(19) United States
(12) Patent Application Publication
(10) Pub. No.: US 2023/0365642 A1
(43) Pub. Date: Nov. 16, 2023

(54) BIFUNCTIONAL SUPERKINES AND USES THEREOF

(71) Applicant: Medicenna Therapeutics, Inc., Toronto (CA)

(72) Inventor: Fahar Merchant, Vancouver (CA)

(21) Appl. No.: 18/002,824

(22) PCT Filed: Jun. 24, 2021
(86) PCT No.: PCT/CA21/50872

§ 371 Date: Dec. 21, 2022

Related U.S. Application Data
(60) Provisional application No. 63/165,738, filed on Mar. 24, 2021.
(60) Provisional application No. 63/165,600, filed on Mar. 24, 2021.
(60) Provisional application No. 63/094,322, filed on Oct. 20, 2020.
(60) Provisional application No. 63/093,724, filed on Oct. 19, 2020.
(60) Provisional application No. 63/043,227, filed on Jun. 24, 2020.

(51) Int. Cl. C07K 14/55; A61P 35/00; C07K 16/28

(52) U.S. Cl. CPC C07K 14/55; A61P 35/00; C07K 16/2818; C07K 2319/30; C07K 2319/31

(57) ABSTRACT

Bispecific human interleukin-2 (IL-2) cytokine fusions are provided. In particular, provided are bispecific IL-2 cytokine fusions that have an increased binding capacity for IL-2Rβ receptor as compared to wild-type IL-2 for use in monotherapeutic applications as well as in combination therapies with anti-PD-1 antibodies for the treatment of cancer. Also provided are pharmaceutical compositions that include such bispecific IL-2 cytokine fusions.

[0001] This application is a 371 National Phase of PCT/CA21/50872 filed Jun. 24, 2021, which claims priority under 35 U.S.C. § 119 to U.S. Patent Application Nos. 63/043,227, filed on Jun. 24, 2020, 63/093,724, filed on Oct. 19, 2020, 63/094,322, filed on Oct. 20, 2020, 63/165,600, filed on Mar. 24, 2021, and 63/165,738, filed on Mar. 24, 2021, all of which are expressly incorporated herein by reference in their entireties.

### DESCRIPTION OF THE TEXT FILE SUBMITTED ELECTRONICALLY

[0002] The contents of the text file submitted electronically herewith are incorporated herein by reference in their entirety: A computer readable format copy of the Sequence Listing (Filename: “117802-5013-US_Sequence_Listing.txt”; Date created: Dec. 21, 2022; File size: 873 KB).

### BACKGROUND

[0003] Interleukin 2 (IL-2) is a pluripotent cytokine produced primarily by activated CD4+ T cells, which plays a crucial role in producing a normal immune response. IL-2 promotes proliferation and expansion of activated T lymphocytes, potentiates B cell growth, and activates monocytes and natural killer cells. It was by virtue of these activities that IL-2 was tested and is used as an approved treatment of cancer (aldesleukin, Proleukin®). In eukaryotic cells, human IL-2 is synthesized as a precursor polypeptide of 153 amino acids, from which 20 amino acids are removed to generate mature secreted IL-2 (Taniguchi 1983). Recombinant human IL-2 has been produced in E. coli (Rosenberg 1984), in insect cells (Smith 1985) and in mammalian COS cells (Taniguchi 1983).

[0004] Interleukin-2 (IL-2) is a four α-helical bundle type I cytokine first identified as a T cell growth factor (Morgan et al., Science 193: 1007 (1976)) but subsequently shown to have broad actions. IL-2 promotes T helper differentiation (Zhu et al., Annual review of immunology 28: 445 (2010); Liao et al., Nat Immunol 9: 1288 (2008); and Liao et al., Nat Immunol 12: 551 (2011)) and the development of regulatory T (Treg) cells (Cheng et al., Immunol Rev 241: 63 (2011)), induces natural killer and lymphokine activated killer activity (Liao et al., Immunity 38: 13 (2013)), and mediates activation-induced cell death (AICD) (Lenardo et al., Nature 353: 858 (1991)).

[0005] IL-2 works by interacting with three different receptors: the interleukin 2 receptor alpha (IL-2Rα; CD25), the interleukin 2 receptor beta (IL-2Rβ;CD122), and the interleukin 2 receptor gamma (IL-2Rγ;CD132; common gamma chain). The first receptor to be identified was the IL-2Rα, which is a 55 kD polypeptide (p55) that appears upon T cell activation and was originally called Tac (for T activation) antigen. The IL-2Rα binds IL-2 with a K_{d} of approximately 10⁻⁸ M, and is also known as the “low affinity” IL-2 receptor. Binding of IL-2 to cells expressing only the IL-2Rα does not lead to any detectable biologic response. In most circumstances, IL-2 works through three different receptors: the IL-2Rα, the IL-2Rβ, and the IL-2Rγ. Most cells, such as resting T cells, are not responsive to IL-2 since they only express the IL-2Rβ, and the IL-2Rγ, which have low affinity for IL-2. Upon stimulation, resting T cells express the relatively high affinity IL-2 receptor IL-2Rα. Binding of IL-2 to the IL-2Rα causes this receptor to sequentially engage the IL-2Rβ, and the IL-2Rγ, bringing about T cell activation. IL-2 “superkines” with augmented action due to enhanced binding affinity for IL-2Rβ were previously developed (Levin et al., Nature 484: 529 (2012)).

[0006] Despite the wealth of knowledge around IL-2, including IL-2 superagonists, there remains a need in the art for bispecific IL-2 cytokine fusions. The present invention meets this need, providing IL-2 superagonists or agonists as bispecific fusions with a second cytokine. In some embodiments, the IL-2 muteins portions of the bispecific fusions comprise substitutions L80F, R81D, L85V, 186V and I92F, numbered in accordance with wild-type IL-2.

### BRIEF SUMMARY

[0007] IL-2 exerts a wide spectrum of effects on the immune system, and it plays crucial roles in regulating both immune activation and homeostasis. As an immune system stimulator, bispecific IL-2 cytokine fusions are described and also find use in monotherapies as well as in combination with anti-PD-1 antibodies for the treatment of cancer.

[0008] In some embodiments, the present invention provides a bispecific IL-2 cytokine fusion, comprising an IL-2 mutein as described herein fused to a second cytokine.

[0009] In some embodiments of the bispecific IL-2 cytokine fusion, the IL-2 mutein comprises the following amino acid substitutions: L80F, R81D, L85V, 186V, and I92F, wherein numbering is in accordance with the wild-type human IL-2 of SEQ ID NO:2.

[0010] In some embodiments of the bispecific IL-2 cytokine fusion, the IL-2 mutein further comprises F42A substitution, wherein numbering is in accordance with the wild-type human IL-2 of SEQ ID NO:2.

[0011] In some embodiments, the bispecific IL-2 cytokine fusion of claim 1, wherein the IL-2 mutein further comprises K43N substitution, wherein numbering is in accordance with the wild-type human IL-2 of SEQ ID NO:2.

[0012] In some embodiments of the bispecific IL-2 cytokine fusion, the IL-2 mutein further comprises Y45A substitution, wherein numbering is in accordance with the wild-type human IL-2 of SEQ ID NO:2.

[0013] In some embodiments of the bispecific IL-2 cytokine fusion, the IL-2 mutein further comprises E62A substitution, wherein numbering is in accordance with the wild-type human IL-2 of SEQ ID NO:2.

[0014] In some embodiments of the bispecific IL-2 cytokine fusion, the IL-2 mutein further comprises an E62A substitution and an F42A substitution, wherein numbering is in accordance with the wild-type human IL-2 of SEQ ID NO:2.

[0015] In some embodiments of the bispecific IL-2 cytokine fusion, the IL-2 mutein is an IL-2 mutein as described in Tables 2, 4, 5, and/or 6.

[0016] In some embodiments of the bispecific IL-2 cytokine fusion, the bispecific IL-2 cytokine fusion comprises a sequence as described in Tables 2, 4, 5, 6, 10, and/or 12 and/or FIG. 54.

[0017] In some embodiments of the bispecific IL-2 cytokine fusion, the bispecific IL-2 cytokine fusion comprises SEQ ID NO:146, SEQ ID NO:147, SEQ ID NO: 148, SEQ ID NO: 149, or SEQ ID NO:150.

[0018] In some embodiments of the bispecific IL-2 cytokine fusion, the bispecific IL-2 cytokine fusion comprises MDNA413-Fc-MDNA109 or MDNA109FEAA-Fc-MDNA413.

[0019] In some embodiments of the bispecific IL-2 cytokine fusion, the bispecific IL-2 cytokine fusion further comprises an Fc antibody fragment.

[0020] In some embodiments of the bispecific IL-2 cytokine fusion, the Fc antibody fragment is a human Fc antibody fragment.

[0021] In some embodiments of the bispecific IL-2 cytokine fusion, the Fc antibody fragment comprises a N297A substitution.

[0022] In some embodiments of the bispecific IL-2 cytokine fusion, the bispecific IL-2 cytokine fusion further comprises albumin.

[0023] In some embodiments of the bispecific IL-2 cytokine fusion, the second cytokine is selected from the group consisting of IL-4, IL-13, IL-10, IL-12, IL15, and IL-18.

[0024] In some embodiments of the bispecific IL-2 cytokine fusion, the second cytokine is IL-4 or IL-13.

[0025] In some embodiments of the bispecific IL-2 cytokine fusion, the second cytokine is as described in Table 7 and/or Table 8 and/or Table 12 and/or Table 28 and/or FIG. 54.

[0026] In some embodiments of the bispecific IL-2 cytokine fusion, the bispecific IL-2 cytokine fusion exhibits increased binding capacity for IL-2Rβ as compared to wild-type human IL-2.

[0027] In some embodiments of the bispecific IL-2 cytokine fusion, the bispecific IL-2 cytokine fusion exhibits a greater binding affinity for IL-2Rβ as compared to wild-type human IL-2.

[0028] In some embodiments of the bispecific IL-2 cytokine fusion, the bispecific IL-2 cytokine fusion exhibits abrogated IL2Ru binding (i.e., does not significantly bind to IL2Ru).

[0029] In some embodiments of the bispecific IL-2 cytokine fusion, the bispecific IL-2 cytokine fusion exhibits decreased binding affinity for CD25 as compared to wild-type human IL-2.

[0030] In some embodiments of the bispecific IL-2 cytokine fusion, the bispecific IL-2 cytokine fusion comprises SEQ ID NO:146, SEQ ID NO:147, SEQ ID NOs:148 and 213, SEQ ID NOs:149 and 213, SEQ ID NO:150, SEQ ID NOs:151 and 214, SEQ ID NO:152, SEQ ID NO:153, SEQ ID NO:154, SEQ ID NO:155, SEQ ID NO:156, SEQ ID NOs:157 and 213, SEQ ID NO:158, SEQ ID NO:159, SEQ ID NO:160, SEQ ID NOs:161 and 215, SEQ ID NOs:162 and 216, SEQ ID NO:163, SEQ ID NO:164, SEQ ID NOs:165 and 213, SEQ ID NOs:166 and 213, or SEQ ID NOs:167 and 217, or a sequence from Table 12 or Table 28 or FIG. 54.

[0031] In some embodiments of the bispecific IL-2 cytokine fusion, the bispecific IL-2 cytokine fusion comprises MDNA413-Fc-MDNA109, MDNA109FEAA-Fc-MDNA413, Fc-MDNA132 (1:1 KiH), Fc-A11 (1:2), Fc-A11 (1:2), Fc-MDNA413 (1:2), Fc-MDNA413 (1:2), Fc4-MDNA413 (1:2), MDNA413-Fc (1:1 KIH), MDNA109-Fc (2:1), MDNA-109FEAA-Fc (2:1), Fc-MDNA109 (1:2), MDNA109FEAA-Fc-MDNA132 (2:1:1 KiH), MDNA413-Fc-MDNA132 (2:1:1 KiH), MDNA109FEAA-Fc-MDNA413 (2:1:2)—version 1, MDNA109FEAA-Fc-MDNA413 (2:1:2)-version 2, MDNA132-Fc-MDNA109 (1:1:1 KIH), MDNA413-Fc-MDNA109 (1:1:1 KIH), MDNA132-Fc-MDNA109FEAA (1:1:1 KIH), or MDNA109-Fc-MDNA413.

[0032] The present invention also provides a method of treating cancer comprising administering a bispecific IL-2 cytokine fusion as described herein.

[0033] In some embodiments, the cancer is selected from the group consisting of prostate cancer, ovarian cancer, breast cancer, endometrial cancer, multiple myeloma, melanoma, lymphomas, lung cancers including small cell lung cancer, kidney cancer, liver cancer, colon cancer, colorectal cancer, pancreatic cancer, gastric cancer, and brain cancer. In some embodiments, the cancer is colon cancer.

[0034] The present invention also provides a method of treating cancer comprising administering a combination treatment comprising:
[0035] (i) an anti-PD-1 antibody or inhibitor or an anti-PD-L1 antibody or inhibitor and
[0036] (ii) a bispecific IL-2 cytokine fusion as described herein.

[0037] In some embodiments, the anti-PD-1 antibody or inhibitor is selected from the group consisting of nivolumab, BMS-936558, MDX-1106, ONO-4538, AMP224, CT-011, and MK-3475(pembrolizumab), cemiplimab (REGN2810), SHR-1210 (CTR20160175 and CTR20170090), SHR-1210 (CTR20170299 and CTR20170322), JS-001 (CTR20160274), IBI308 (CTR20160735), BGB-A317 (CTR20160872) and a PD-1 antibody as recited in U.S. Patent Publication No. 2017/0081409 or in Table 38.

[0038] In some embodiments, the anti-PD-L1 antibody or inhibitor is selected from the group consisting of atezolizumab, avelumab, and Durvalumab.

[0039] In some embodiments, the cancer is selected from the group consisting of prostate cancer, ovarian cancer, breast cancer, endometrial cancer, multiple myeloma, melanoma, lymphomas, lung cancers including small cell lung cancer, kidney cancer, liver cancer, colon cancer, colorectal cancer, pancreatic cancer, gastric cancer, and brain cancer. In some embodiments, the cancer is colon cancer.

[0040] The present invention also provides pharmaceutical compositions comprising a bispecific IL-2 cytokine fusion as described herein, and a pharmaceutically acceptable carrier.

[0041] The present invention also provides a pharmaceutical composition comprising an anti-PD-1 antibody or inhibitor, a bispecific IL-2 cytokine fusion as described herein, and a pharmaceutically acceptable carrier.

### BRIEF DESCRIPTION OF THE DRAWINGS

[0042] FIG. 1: Provides examples of IgG1, IgG2, IgG3, and IgG4 sequences.

[0043] FIG. 2: Provides exemplary H9-Fc fusion sequences.

[0044] FIG. 3: Exemplary oncolytic viruses.

[0045] FIG. 4: SDS-PAGE and HPLC analysis of MDNA132-Fc-MDNA109 (KIH) [Lot: T1848A12] post purification.

[0046] FIG. 5: SDS-PAGE and HPLC analysis of MDNA413-Fc-MDNA109 (KIH) [Lot: T1903A08] post purification.

[0047] FIG. 6: SDS-PAGE and HPLC analysis of MDNA109FEAA-Fc-MDNA413 (2:1:2) [Lot: T1914B08] post purification.

[0048] FIG. 7: Gating strategy. PBMCs were stimulated with IL-2 (25 nM) for 15 minutes prior to staining and analysis by flow-cytometry. Single lymphocytes were identified from which NK cells (CD3⁻CD56⁺), CD8 T cells (CD3⁺CD8⁺), Tregs (CD3⁺CD4⁺CD25⁺FOXP3⁺) and non-Treg CD4 T cells (CD3⁺CD25⁻CD4⁺FOXP3⁻) were gated. Frequency of pSTAT5 positive cells was determined for each immune subset.

[0049] FIG. 8: Fluorescence minus one (FMO) controls. A) Following stimulation and gating strategy described in FIG. 4, all antibodies used to identify the different immune subsets were included except for pSTAT5 to provide an FMO control that could be used to create a pSTAT5⁺ gate for each population. B) FMOs for FOXP3 and CD25 were used to determine Treg population.

[0050] FIG. 9: Representative dose-response of IL-2, IL2-Fc, MDNA109 variants, and bi-specific superkines on pSTAT5 PBMCs. Graphs and EC₅₀ values were calculated using non-linear regression. Each data point is a singlet.

[0051] FIG. 10: EC₅₀ ratios of naïve CD8T cells (left) and NK cells (right) to Tregs.

[0052] FIG. 11: Survival BALB/c mice receiving different doses of MDNA132-Fc-MDNA109 (left) and MDNA413-Fc-MDNA109 (right).

[0053] FIG. 12: Survival C57Bl/6 mice receiving different doses of MDNA132-Fc-MDNA109 (left) and MDNA413-Fc-MDNA109 (right).

[0054] FIG. 13: MDNA132-Fc-MDNA109 (KIH) inhibits the growth of CT26 colon tumors. (a) Average tumor size in vehicle control and MDNA132-Fc-MDNA109 treatment groups. (b) growth of individual tumors in each groups. Each line represents a single tumor. CR=complete regression.

[0055] FIG. 14: CT26 tumor re-challenge. (a) Naïve untreated mice or mice previously cured of their CT26 tumors by MDNA132-Fc-MDNA109 were re-challenged on the opposite flank with CT26 tumor cells. (b) Overall survival to date.

[0056] FIG. 15: MDNA413-Fc-MDNA109 inhibits the growth of B16 F10 melanomas. Average tumor size of each treatment group (left) Individual tumor growth (right).

[0057] FIG. 16A-16B: Treatment of B16F10 tumor bearing mice with Vehicle (PBS) or MDNA109FEAA-Fc-MDNA413.

[0058] FIG. 17: Efficacy study in 4T1 model with MDNA132-Fc-MDNA109 and MDNA413-Fc-MDNA109 monotherapy and in combination with anti-PD1.

[0059] FIG. 18: B16F10 intra-tumoral injection with PBS or MDNA132-Fc-MDNA109 (KIH). Injections were performed on Day 14, 17, and 20 post-implant.

[0060] FIG. 19: CT26 intra-tumoral injection with MDNA109FEAA-Fc-MDNA413. Injections were performed on Day 11, 14, and 17.

[0061] FIG. 20: Activation of STAT6 signaling pathway in HEK Blue™ IL-4/IL-13 cells in the presence of human IL-4 (hIL4), human IL-13 (hIL13) or mouse IL-13 (mIL13).

[0062] FIG. 21: Inhibition of STAT6 signaling pathway in HEK Blue™ IL-4/IL-13 cells when cells were incubated with hIL13 together with MDNA413-Fc-MDNA109 (KIH), MDNA109-Fc-MDNA413, or Fc-MDNA413.

[0063] FIG. 22: Inhibition of STAT6 signaling pathway in HEK Blue™ IL-4/IL-13 cells when cells were incubated with mIL13 together with MDNA413-Fc-MDNA109 (KIH), MDNA109-Fc-MDNA413, or Fc-MDNA413.

[0064] FIG. 23: Inhibition of STAT6 signaling pathway in HEK Blue™ IL-4/IL-13 cells when cells were incubated with hIL4 together with MDNA413-Fc-MDNA109 (KIH), MDNA109-Fc-MDNA413, or Fc-MDNA413.

[0065] FIG. 24: Proliferation of CTLL2 cells when the cell culture was supplemented with the indicated proteins.

[0066] FIG. 25: Schematic and binding information for MDNA11.

[0067] FIG. 26: MDNA11 exhibits enhanced potency on naïve CD8+ T and NK cells & diminished activity on Tregs.

[0068] FIG. 27: MDNA11 inhibits tumor growth & induces a strong memory response as monotherapy & in combination with αCTLA4 in CT26 tumor model. CT26 tumor (˜60 mm³) bearing Balb/c mice were treated with MDNA11 (5 mg/kg Ix/week, 2 weeks) or Anti-CTLA4 (200 μg 2×/week, 2 weeks) by IP injection. Re-challenge experiment performed by implanting 2×10⁶ CT26 cells in opposite flank (Day 49, Day 116 and Day 165), without further treatment. Control mice showed robust tumor growth at each re-challenge experiment (representative data for control shown).

[0069] FIG. 28: Development of long-term (gp70) specific CD8 T cells protected mice against CT26 tumors. Mice challenged with CT26 cells 5 days prior to euthanasia; control mice were age matched. Analysis by flow cytometry using APC anti-mouse CD3ε, anti-CD8 FITC clone KT15 and H-2Ld MuLV gp70 Tetramer-PE.

[0070] FIG. 29: MDNA11 delays the growth of B16F10 melanomas as monotherapy & in combination with TA99 MAb by promoting Tumor Infiltrating Lymphocytes (TILs). For efficacy study: 1) Treatment initiated 9-days post implant; average tumor size ˜15 mm³ and 2) MDNA11 (5 mg/kg, IP, Q.W); TA99 MAb (150 μg, IP, B.I.W.) for 3 cycle. For TILs analysis: 1) Average tumor size ˜50 mm³ when mice received a single dosing with MDNA11 (5 mg/kg; IP) and 2) TILs analyzed by flow cytometry. For TILs analyzed by flow cytometry: 1) CD8 T cells (CD45⁺CD8⁺), 2) NK cells (CD45⁺NK1.1), and 3) Tregs (CD4⁺CD25⁺FoxP3⁺).

[0071] FIG. 30: MDNA11 displays extended half-life in mice and NHP.

[0072] FIG. 31: MDNA11 induces proliferation & expansion of CD4+ T, CD8+ T and NK cells but not Tregs in NHP.

[0073] FIG. 32: Targeting immunologic “cold tumors” by modulation of TME with IL-2/IL-13 Bi-specific Superkines. “Cold” tumors are not responsive to check-point inhibitors because of a pro-tumoral TME: 1) Low CD8 & NK cell counts; high Treg counts and 2) High number of immune-suppressive myeloid cells (i.e. TAM & MDSC).

[0074] FIG. 33: Bi-specific MDNA109FEAA-Fc-MDNA413 Superkine induces Th1 and reduces Th2 immune responses.

[0075] FIG. 34: Enhanced potency on CD8+ T and NK cells; diminished activity on Tregs-Strong Th1 response-MDNA109FEAA-Fc (MDNA11) and MDNA109FEAA-Fc-MDNA413 inhibits hIL-4/hIL-13 induced signaling in HEK-Blue reporter cells-Suppression of Th2 response.

[0076] FIG. 35: ELISA assay measuring binding of Fc-hIL13 to various IL13 and IL4 receptors, including human IL13Rα2, mouse IL13Rα2, human IL13Rα1, mouse IL13Rα1, human IL4R and mouse IL4R.

[0077] FIG. 36A: ELISA assay measuring binding of MDNA132-Fc-MDNA109 binding to human IL13Rα2. FIG. 36B: ELISA assay measuring binding of MDNA132-Fc-MDNA109 binding to mouse IL13Rα2.

[0078] FIG. 37A: ELISA assay measuring binding of various fusion protein comprising MDNA413 to human IL13Rα1. FIG. 37B: ELISA assay measuring binding of various fusion protein comprising MDNA413 to mouse IL13Rα1.

[0079] FIG. 38A-38B: Sensograms of the biacore analysis for Fc-MDNA132 (1:1 KIH) as ligand and receptors, IL13Rα1 and IL13Rα2 as antigens.

[0080] FIG. 39A-39B: Sensograms of the biacore analysis for Fc-MDNA413 (1:2) as ligand and receptors, IL13Rα1 as antigens.

[0081] FIG. 40A-40B: Sensograms of the biacore analysis for Fc-MDNA413 (1:2) as ligand and receptors, IL13Rα2 as antigens.

[0082] FIG. 41A-41D: Binding affinity to IL13Rα1 by SPR (MCK, multi-cycle kinetics).

[0083] FIG. 42A-42B: pSTAT5 Signaling Assay in Human PBMC.

[0084] FIG. 43A-43C: Measurement of pSTAT6 signaling.

[0085] FIG. 44A-44B: Macrophage polarization assay.

[0086] FIG. 45A-45E: Binding affinity to IL13Rα1 and IL13Rα2 by SPR (MCK, multi-cycle kinetics).

[0087] FIG. 46A-46C: Inhibition of tumor growth in a CT26 colon cancer model by bispecific construct MDNA132-Fc-MDNA109.

[0088] FIG. 47: HEK Blue IL2 Assay.

[0089] FIG. 48: CTTL-2 Assay.

[0090] FIG. 49A-49B: HEK Blue IL4 Assay.

[0091] FIG. 50A-50B: HEK Blue IL13 Assay.

[0092] FIG. 51A-51D: TF-1 Assay.

[0093] FIG. 52A-52B: pSTAT5 Assay in human PBMCs.

[0094] FIG. 53A-53D: SPR Study.

[0095] FIG. 54A-54J: Bispecific sequence information for various construct embodiments.

[0096] FIG. 55: Directed evolution combined with yeast display results in tunable superkines.

[0097] FIG. 56: MDNA109 is an engineered version of human IL-2 showing enhanced agonist activity.

[0098] FIG. 57: Introduction to long-acting IL-2 superkines.

[0099] FIG. 58: MDNA11 is a ‘beta-only’ superkine with uniquely enhanced affinity for CD122.

[0100] FIG. 59: MDNA11 preferentially stimulates immune effector cells.

[0101] FIG. 60: MDNA11 shows monotherapy anti-tumor efficacy and combination effect with anti-PD1 in MC38 tumor model.

[0102] FIG. 61: MDNA11⁺ anti-CTLA4 induces tumor clearance, protects against, re-challenges, and promotes antigen-specific CD8 T-cells.

[0103] FIG. 62: MDNA11 induces durable and sustained proliferation and expansion of immune effector cells but not T_{regs} in NHP.

[0104] FIG. 63: Superkine targeted with antibody (STAb) enhances accumulation in tumors.

[0105] FIG. 64: STAb overcomes checkpoint resistance and ‘cold’ tumors.

[0106] FIG. 65: Role of IL-4 and IL-13 receptors in cancer.

[0107] FIG. 66: MDNA132 is an engineered version of human IL-13 targeting tumor specific antigen.

[0108] FIG. 67: MDNA132 plays a role in localizing T-cell engager and checkpoint inhibitor to tumors.

[0109] FIG. 68: MDNA413 is an engineered version of human IL-13 showing antagonist activity.

[0110] FIG. 69: Fc-MDNA413 inhibits IL-4 and IL-13 induced signaling and function.

[0111] FIG. 70: Mechanism of action of dual specific cytokine (DUCK Cancer) MDNA109FEAA-Fc-MDNA413.

[0112] FIG. 71: TF-1 Assay.

[0113] FIG. 72: SPR Study.

[0114] FIG. 73A-73B: SPR Study.

[0115] FIG. 74A-74B: SPR Study.

[0116] FIG. 75A-75D: SPR Study.

[0117] FIG. 76A-76E: Inhibition of IL-4 induced M2 polarization.

[0118] FIG. 77A-77E: Inhibition of IL-13 induced M2 polarization.

### DETAILED DESCRIPTION

[0119] In order for the present disclosure to be more readily understood, certain terms and phrases are defined below as well as throughout the specification.

### Definitions

[0120] All references cited herein are incorporated by reference in their entirety as though fully set forth. Unless defined otherwise, technical and scientific terms used herein have the same meaning as commonly understood by one of ordinary skill in the art to which this invention belongs. Singleton et al., Dictionary of Microbiology and Molecular Biology 3rd ed., J. Wiley & Sons (New York, NY 2001); March, Advanced Organic Chemistry Reactions, Mechanisms and Structure 5th ed., J. Wiley & Sons (New York, NY 2001); and Sambrook and Russell, Molecular Cloning: A Laboratory Manual 3rd ed., Cold Spring harbor Laboratory Press (Cold Spring Harbor, NY 2001), provide one skilled in the art with a general guide to many terms used in the present disclosure. As appropriate, procedures involving the use of commercially available kits and reagents are generally carried out in accordance with manufacturer defined protocols and/or parameters unless otherwise noted.

[0121] As used herein, “IL-2” means wild-type IL-2, whether native or recombinant. Mature human IL-2 occurs as a 133 amino acid sequence (less the signal peptide, consisting of an additional 20 N-terminal amino acids), as described in Fujita, et. al., PNAS USA, 80, 7437-7441 (1983). The amino acid sequence of human IL-2 (SEQ ID NO:1; full length) is found in Genbank under accession locator NP_000577.2. The amino acid sequence of mature human IL-2 is depicted in SEQ ID NO:2 (human wild-type mature; position numbering of the substitutions is based on this sequence). The murine (Mus musculus) IL-2 amino acid sequence is found in Genbank under accession locator (SEQ ID NO:3). The amino acid sequence of mature murine IL-2 is depicted in SEQ ID NO:4.

SEQ ID NO: 1
MYRMQLLSCIALSLALVTNSAPTSSSTKKTQLQLEHLLLDLQMILNGIN
NYKNPKLTRMLTFKFYMPKKATELKHLQCLEEELKPLEEVLNLAQSKNF
HLRPRDLISNINVIVLELKGSETTFMCEYADETATIVEFLNRWITFCQS
IISTLT
SEQ ID NO: 2
[sequence omitted]
SEQ ID NO: 3
MYSMQLASCVTLTLVLLVNSAPTSSSTSSSTAEAQQQQQQQQQQQQHLE
QLLMDLQELLSRMENYRNLKLPRMLTFKFYLPKQATELKDLQCLEDELG
PLRHVLDLTQSKSFQLEDAENFISNIRVTVVKLKGSDNTFECQFDDESA
TVVDFLRRWIAFCQSIISTSPQ
SEQ ID NO: 4
APTSSSTSSSTAEAQQQQQQQQQQQQHLEQLLMDLQELLSRMENYRNLK
LPRMLTFKFYLPKQATELKDLQCLEDELGPLRHVLDLTQSKSFQLEDAE
NFISNIRVTVVKLKGSDNTFECQFDDESATVVDFLRRWIAFCQSIISTS
PQ

[0122] As used herein, “IL-2 mutein” means an IL-2 polypeptide wherein specific substitutions to the interleukin-2 protein have been made. The IL-2 muteins are characterized by amino acid insertions, deletions, substitutions and modifications at one or more sites in or at the other residues of the native IL-2 polypeptide chain. In accordance with this disclosure, any such insertions, deletions, substitutions and modifications result in an IL-2 mutein that retains the IL-2RD binding activity. Exemplary muteins can include substitutions of 1, 2, 3, 4, 5, 6, 7, 8, 9, 10 or more amino acids.

[0123] Muteins also include conservative modifications and substitutions at other positions of IL-2 (i.e., those that have a minimal effect on the secondary or tertiary structure of the mutein). Such conservative substitutions include those described by Dayhoff in The Atlas of Protein Sequence and Structure 5 (1978), and by Argos in EMBO J., 8:779-785 (1989). For example, amino acids belonging to one of the following groups represent conservative changes: Group I: ala, pro, gly, gln, asn, ser, thr; Group II: cys, ser, tyr, thr; Group III: val, ile, leu, met, ala, phe; Group IV: lys, arg, his; Group V: phe, tyr, trp, his; and Group VI: asp, glu.

[0124] “Numbered in accordance with IL-2” means identifying a chosen amino acid with reference to the position at which that amino acid normally occurs in the mature sequence of wild type IL-2, for example R81 refers to the eighty-first amino acid, arginine, that occurs in SEQ ID NO:2. L80 refers to the eightieth amino acid, leucine, that occurs in SEQ ID NO:2. L85 refers to the eighty-fifth amino acid, leucine, that occurs in SEQ ID NO:2. 186 refers to the eighty-sixth amino acid, isoleucine, that occurs in SEQ ID NO:2. 192 refers to the ninety-second amino acid, isoleucine, that occurs in SEQ ID NO:2. F42 refers to the forty-second amino acid, phenylalanine, that occurs in SEQ ID NO:2. K43 refers to the forty-third amino acid, lysine, that occurs in SEQ ID NO:2.

[0125] As used herein, the abbreviations for the genetically encoded L-enantiomeric amino acids used in the disclosure methods are conventional and are as follows in Table 1.

TABLE 1
Amino acid abbreviations

| | One-Letter | Common |
|---|---|---|
| Amino Acid | Symbol | Abbreviation |
| Alanine | A | Ala |
| Arginine | R | Arg |
| Asparagine | N | Asn |
| Aspartic acid | D | Asp |
| Cysteine | C | Cys |
| Glutamine | Q | Gln |
| Glutamic acid | E | Glu |
| Glycine | G | Gly |
| Histidine | H | His |
| Isoleucine | I | Ile |
| Leucine | L | Leu |
| Lysine | K | Lys |
| Methionine | M | Met |
| Phenylalanine | F | Phe |
| Proline | P | Pro |
| Serine | S | Ser |
| Threonine | T | Thr |
| Tryptophan | W | Trp |
| Tyrosine | Y | Tyr |
| Valine | V | Val |

[0126] “Hydrophilic Amino Acid” refers to an amino acid exhibiting a hydrophobicity of less than zero according to the normalized consensus hydrophobicity scale of Eisenberg et al., 1984, J. Mol. Biol. 179: 125-142. Genetically encoded hydrophilic amino acids include Thr (T), Ser (S), His (H), Glu (E), Asn (N), Gln (Q), Asp (D), Lys (K) and Arg (R).

[0127] The term “cell types having the IL-2Rαγ receptor” means the cells known to have this receptor type, i.e., T cells, activated T cells, B cells, activated monocytes, and activated NK cells. The term “cell types having the IL-2Rβγ receptor” means the cells known to have that receptor type, i.e., B cells, resting monocytes, and resting NK cells.

[0128] The term “identity,” as used herein in reference to polypeptide or DNA sequences, refers to the subunit sequence identity between two molecules. When a subunit position in both of the molecules is occupied by the same monomeric subunit (i.e., the same amino acid residue or nucleotide), then the molecules are identical at that position. The similarity between two amino acid or two nucleotide sequences is a direct function of the number of identical positions. In general, the sequences are aligned so that the highest order match is obtained. If necessary, identity can be calculated using published techniques and widely available computer programs, such as the GCS program package (Devereux et al., Nucleic Acids Res. 12:387, 1984), BLASTP, BLASTN, FASTA (Atschul et al., J. Molecular Biol. 215:403, 1990). Sequence identity can be measured using sequence analysis software such as the Sequence Analysis Software Package of the Genetics Computer Group at the University of Wisconsin Biotechnology Center (1710 University Avenue, Madison, Wis. 53705), with the default parameters thereof.

[0129] The terms “polypeptide,” “protein” or “peptide” refer to any chain of amino acid residues, regardless of its length or post-translational modification (e.g., glycosylation or phosphorylation).

[0130] In the event the mutant IL-2 polypeptides of the disclosure are “substantially pure,” they can be at least about 60% by weight (dry weight) the polypeptide of interest, for example, a polypeptide containing the mutant IL-2 amino acid sequence. For example, the polypeptide can be at least about 75%, about 80%, about 85%, about 90%, about 95% or about 99%, by weight, the polypeptide of interest. Purity can be measured by any appropriate standard method, for example, column chromatography, polyacrylamide gel electrophoresis, or HPLC analysis.

[0131] An “agonist” is a compound that interacts with a target to cause or promote an increase in the activation of the target.

[0132] A “partial agonist” is a compound that interacts with the same target as an agonist but does not produce as great a magnitude of a biochemical and/or physiological effect as the agonist, even by increasing the dosage of the partial agonist.

[0133] A “superagonist” (also referred to as a “superkine”) is a type of agonist that is capable of producing a maximal response greater than the endogenous agonist for the target receptor, and thus has an efficacy of more than 100%.

[0134] “Operably linked” is intended to mean that the nucleotide sequence of interest (i.e., a sequence encoding an IL-2 mutein) is linked to the regulatory sequence(s) in a manner that allows for expression of the nucleotide sequence (e.g., in an in vitro transcription/translation system or in a host cell when the vector is introduced into the host cell). “Regulatory sequences” include promoters, enhancers, and other expression control elements (e.g., polyadenylation signals). See, for example, Goeddel (1990) in Gene Expression Technology: Methods in Enzymology 185 (Academic Press, San Diego, Calif). Regulatory sequences include those that direct constitutive expression of a nucleotide sequence in many types of host cells and those that direct expression of the nucleotide sequence only in certain host cells (e.g., tissue-specific regulatory sequences). It will be appreciated by those skilled in the art that the design of the expression vector can depend on such factors as the choice of the host cell to be transformed, the level of expression of protein desired, and the like. The expression constructs of the invention can be introduced into host cells to thereby produce the human IL-2 muteins disclosed herein or to produce biologically active variants thereof.

[0135] The terms “host cell” and “recombinant host cell” are used interchangeably herein. It is understood that such terms refer not only to the particular subject cell but also to the progeny or potential progeny of such a cell. Because certain modifications may occur in succeeding generations due to either mutation or environmental influences, such progeny may not, in fact, be identical to the parent cell but are still included within the scope of the term as used herein.

[0136] As used herein, the terms “transformation” and “transfection” refer to a variety of art-recognized techniques for introducing foreign nucleic acid (e.g., DNA) into a host cell, including calcium phosphate or calcium chloride co-precipitation, DEAE-dextran-mediated transfection, lipofection, particle gun, or electroporation.

[0137] As used herein, the term “pharmaceutically acceptable carrier” includes, but is not limited to, saline, solvents, dispersion media, coatings, antibacterial and antifungal agents, isotonic and absorption delaying agents, and the like, compatible with pharmaceutical administration. Supplementary active compounds (e.g., antibiotics) can also be incorporated into the compositions.

[0138] As used herein, the term “anti-PD-1 antibody” refers to any antibody that binds to PD-1, including inhibitory antibodies. An “anti-PD-1 inhibitor” refers to an inhibitor that binds to and inhibits PD-1. Such anti-PD-1 antibodies and/or inhibitors include but are not limited to nivolumab, BMS-936558, MDX-1106, ONO-4538, AMP224, CT-011, and MK-3475, among others.

[0139] As used herein, the terms “cancer” (or “cancerous”), “hyperproliferative,” and “neoplastic” to refer to cells having the capacity for autonomous growth (i.e., an abnormal state or condition characterized by rapidly proliferating cell growth). Hyperproliferative and neoplastic disease states may be categorized as pathologic (i.e., characterizing or constituting a disease state), or they may be categorized as non-pathologic (i.e., as a deviation from normal but not associated with a disease state). The terms are meant to include all types of cancerous growths or oncogenic processes, metastatic tissues or malignantly transformed cells, tissues, or organs, irrespective of histopathologic type or stage of invasiveness. “Pathologic hyperproliferative” cells occur in disease states characterized by malignant tumor growth. Examples of non-pathologic hyperproliferative cells include proliferation of cells associated with wound repair. The terms “cancer” or “neoplasm” are used to refer to malignancies of the various organ systems, including those affecting the lung, breast, thyroid, lymph glands and lymphoid tissue, reproductive systems, gastrointestinal organs, and the genitourinary tract, as well as to adenocarcinomas which are generally considered to include malignancies such as most colon cancers, renal-cell carcinoma, prostate cancer and/or testicular tumors, non-small cell carcinoma of the lung, cancer of the small intestine and cancer of the esophagus. Cancers generally can include prostate cancer, ovarian cancer, breast cancer, endometrial cancer, multiple myeloma, melanoma, lymphomas, lung cancers including small cell lung cancer, kidney cancer, colorectal cancer, pancreatic cancer, gastric cancer, and brain cancer.

[0140] The term “carcinoma” is art-recognized and refers to malignancies of epithelial or endocrine tissues including respiratory system carcinomas, gastrointestinal system carcinomas, genitourinary system carcinomas, testicular carcinomas, breast carcinomas, prostatic carcinomas, endocrine system carcinomas, and melanomas. An “adenocarcinoma” refers to a carcinoma derived from glandular tissue or in which the tumor cells form recognizable glandular structures.

[0141] As used herein, the term “hematopoietic neoplastic disorders” refers to diseases involving hyperplastic/neoplastic cells of hematopoietic origin, e.g., arising from myeloid, lymphoid or erythroid lineages, or precursor cells thereof. Preferably, the diseases arise from poorly differentiated acute leukemias (e.g., erythroblastic leukemia and acute megakaryoblastic leukemia). Additional exemplary myeloid disorders include, but are not limited to, acute promyeloid leukemia (APML), acute myelogenous leukemia (AML) and chronic myelogenous leukemia (CML) (reviewed in Vaickus, L. (1991) Crit Rev. in Oncol./Hemotol. 11:267-97); lymphoid malignancies include, but are not limited to acute lymphoblastic leukemia (ALL) which includes B-lineage ALL and T-lineage ALL, chronic lymphocytic leukemia (CLL), prolymphocytic leukemia (PLL), hairy cell leukemia (HLL) and Waldenstrom's macroglobulinemia (WM). Additional forms of malignant lymphomas include, but are not limited to non-Hodgkin lymphoma and variants thereof, peripheral T cell lymphomas, adult T cell leukemia/lymphoma (ATL), cutaneous T cell lymphoma (CTCL), large granular lymphocytic leukemia (LGF), Hodgkin's disease and Reed-Stemberg disease.

[0142] As used herein, the terms “treatment,” “treating,” and the like, refer to obtaining a desired pharmacologic and/or physiologic effect. The effect may be prophylactic in terms of completely or partially preventing a disease or symptom thereof and/or may be therapeutic in terms of a partial or complete cure for a disease and/or adverse effect attributable to the disease. “Treatment,” as used herein, covers any treatment of a disease in a mammal, particularly in a human, and includes: (a) preventing the disease from occurring in a subject predisposed to the disease or at risk of acquiring the disease but has not yet been diagnosed as having it; (b) inhibiting the disease, i.e., arresting its development; and (c) relieving the disease, i.e., causing regression of the disease. A therapeutically effective amount can be an amount that reduces tumor number, tumor size, and/or increases survival.

[0143] The terms “individual,” “subject,” and “patient” are used interchangeably herein, and refer to a mammal, including, but not limited to, human and non-human primates, including simians and humans; mammalian sport animals (e.g., horses); mammalian farm animals (e.g., sheep, goats, etc.); mammalian pets (dogs, cats, etc.); and rodents (e.g., mice, rats, etc.).

[0144] The terms “pharmaceutically acceptable” and “physiologically acceptable” mean a biologically acceptable formulation, gaseous, liquid or solid, or mixture thereof, suitable for one or more routes of administration, in vivo delivery or contact. A “pharmaceutically acceptable” or “physiologically acceptable” composition is a material that is not biologically or otherwise undesirable, e.g., the material may be administered to a subject without causing substantial undesirable biological effects. Thus, such a pharmaceutical composition may be used, for example in administering an IL-2 mutein to a subject. In particular, an IL-2 mutein comprising the substitutions L80F, R81D, L85V, I86V, and I92F is administered in combination with anti-PD-1 to a subject with cancer. In some embodiments, the IL-2 mutein administered further comprises a substitution at position F42A. In some embodiments, the IL-2 administered mutein further comprises a substitution at position K43N.

[0145] The phrase a “unit dosage form” as used herein refers to physically discrete units suited as unitary dosages for the subject to be treated; each unit containing a predetermined quantity optionally in association with a pharmaceutical carrier (excipient, diluent, vehicle or filling agent) which, when administered in one or more doses, produces a desired effect (e.g., prophylactic or therapeutic effect). In some embodiments, the therapeutic effect is to reduce tumor number. In some embodiments, the therapeutic effect is to reduce tumor size. In some embodiments, the therapeutic effect is to increase survival.

[0146] In some embodiments, unit dosage forms may be within, for example, ampules and vials, including a liquid composition, or a composition in a freeze-dried or lyophilized state; a sterile liquid carrier, for example, can be added prior to administration or delivery in vivo. Individual unit dosage forms can be included in multi-dose kits or containers. IL-2 muteins in combination with anti-PD-1 antibodies, and pharmaceutical compositions thereof can be packaged in a single or multiple unit dosage form for ease of administration and uniformity of dosage.

[0147] A “therapeutically effective amount” will fall in a relatively broad range determinable through experimentation and/or clinical trials. For example, for in vivo injection, e.g., injection directly into the tissue or vasculature of a subject (for example, liver tissue or veins). Other effective dosages can be readily established by one of ordinary skill in the art through routine trials establishing dose response curves.

[0148] An “effective amount” or “sufficient amount” refers to an amount providing, in single or multiple doses, alone or in combination, with one or more other compositions (therapeutic agents such as a drug), treatments, protocols, or therapeutic regimens agents (including, for example, vaccine regimens), a detectable response of any duration of time (long or short term), an expected or desired outcome in or a benefit to a subject of any measurable or detectable degree or for any duration of time (e.g., for minutes, hours, days, months, years, or cured).

[0149] The doses of an “effective amount” or “sufficient amount” for treatment (e.g., to ameliorate or to provide a therapeutic benefit or improvement) typically are effective to provide a response to one, multiple or all adverse symptoms, consequences or complications of the disease, one or more adverse symptoms, disorders, illnesses, pathologies, or complications, for example, caused by or associated with the disease, to a measurable extent, although decreasing, reducing, inhibiting, suppressing, limiting or controlling progression or worsening of the disease is also a satisfactory outcome. In some embodiments, the effective amount is an amount sufficient to reduce tumor number. In some embodiments, the effective amount is an amount sufficient to reduce tumor size. In some embodiments, the effective amount is an amount sufficient to increase survival.

[0150] “Prophylaxis” and grammatical variations thereof mean a method in which contact, administration or in vivo delivery to a subject is prior to disease. Administration or in vivo delivery to a subject can be performed prior to development of an adverse symptom, condition, complication, etc. caused by or associated with the disease. For example, a screen (e.g., genetic) can be used to identify such subjects as candidates for the described methods and uses, but the subject may not manifest the disease. Such subjects therefore include those screened positive for an insufficient amount or a deficiency in a functional gene product (protein), or producing an aberrant, partially functional or non-functional gene product (protein), leading to disease; and subjects screening positive for an aberrant, or defective (mutant) gene prod]uct (protein) leading to disease, even though such subjects do not manifest symptoms of the disease.

### I. DETAILED DESCRIPTION

[0151] Described herein are bispecific IL-2 cytokine fusions, which comprise an IL-2 mutein fused to a second cytokine. Also described herein IL-2 muteins comprising the substitutions L80F, R81D, L85V, I86V, and I92F, which have an increased binding capacity for IL-2RD receptor, which can be included in the bispecific IL-2 cytokine fusions. Also described herein are uses of bispecific IL-2 cytokine fusions for use in monotherapies as well as in combination treatments with anti-PD-1 antibodies. In some embodiments, the IL-2 mutein comprising L80F, R81D, L85V, I86V and I92F, numbered in accordance with wild-type human IL-2 (SEQ ID NO:2; wild-type hIL-2) is referred to as H9. Such IL-2 muteins find use, for example, when combined with anti-PD-1 antibodies for the treatment of cancer. Also provided are nucleic acids encoding such IL-2 muteins, methods of making such IL-2 muteins, pharmaceutical compositions that include such IL-2 muteins and methods of treatment using such IL-2 muteins.

[0152] A. IL-2 Muteins for Use in Bispecific IL-2 Cytokine Fusions

[0153] The substituted amino acid residue(s) can be, but are not necessarily, conservative substitutions, which typically include substitutions within the following groups: glycine, alanine; valine, isoleucine, leucine; aspartic acid, glutamic acid; asparagine, glutamine; serine, threonine; lysine, arginine; and phenylalanine, tyrosine. These mutations can be at amino acid residues that contact the IL-2Rβ and/or the IL-2Rγ.

[0154] More specifically, a mutation (whether conservative or non-conservative, by way of addition(s) or deletion(s)) can be made at one or more of positions. For example, the mutation can be: I24V, P65H, Q74R, Q74H, Q74N, Q74S, L80F, L80V, R81I, R81T, R81D, L85V, I86V, I89V, I92F, V93I. The sequences of exemplary IL-2 muteins are as follows: 5-1 SEQ ID NO:5; 5-2 SEQ ID NO:6; 6-6 SEQ ID NO:7; A2 SEQ ID NO:8; B1 SEQ ID NO: 9; B11 SEQ ID NO: 10; C5 SEQ ID NO:11; D10 SEQ ID NO: 12; E10 SEQ ID NO:13; G8 SEQ ID NO: 14; H4 SEQ ID NO: 15; and H9 SEQ ID NO: 16.

[0155] In some embodiments, the substitutions in the IL-2 mutein comprise L80F, R81D, L85V, I86V, and I92F, numbered in accordance with wild-type human IL-2 of SEQ ID NO:2. In some embodiments, the IL-2 mutein further comprises F42A substitution, wherein numbering is in accordance with the wild-type human IL-2 of SEQ ID NO:2. In some embodiments, the IL-2 mutein further comprises Y45A substitution, wherein numbering is in accordance with the wild-type human IL-2 of SEQ ID NO:2. In some embodiments, the IL-2 mutein further comprises E62A substitution, wherein numbering is in accordance with the wild-type human IL-2 of SEQ ID NO:2. In some embodiments, the substitutions in the IL-2 mutein comprise F42A, L80F, R81D, L85V, I86V, and I92F, numbered in accordance with wild-type human IL-2 of SEQ ID NO:2. In some embodiments, the substitutions in the IL-2 mutein comprise F42A, Y45A, L80F, R81D, L85V, I86V, and I92F, numbered in accordance with wild-type human IL-2 of SEQ ID NO:2. In some embodiments, the substitutions in the IL-2 mutein comprise F42A, E62A, L80F, R81D, L85V, I86V, and I92F, numbered in accordance with wild-type human IL-2 of SEQ ID NO:2. In some embodiments, the substitutions in the IL-2 mutein comprise F42A, Y45A, E62A, L80F, R81D, L85V, I86V, and I92F, numbered in accordance with wild-type human IL-2 of SEQ ID NO:2. In some embodiments, the substitutions in the IL-2 mutein comprise E62A, L80F, R81D, L85V, I86V, and I92F, numbered in accordance with wild-type human IL-2 of SEQ ID NO:2. In some embodiments, the substitutions in the IL-2 mutein comprise Y45A, E62A, L80F, R81D, L85V, I86V, and I92F, numbered in accordance with wild-type human IL-2 of SEQ ID NO:2. In some embodiments, the substitutions in the IL-2 mutein comprise Y45A and E62A, numbered in accordance with wild-type human IL-2 of SEQ ID NO:2.

[0156] In some embodiments, the substitutions in the IL-2 mutein that lead to increased and/or enhanced IL-2Rβ binding include L80F, R81D, L85V, I86V, and I92F, numbered in accordance with wild-type human IL-2 of SEQ ID NO:2. In some embodiments, an IL-2 mutein for use in the invention comprises L80F, R81D, L85V, I86V, and I92F and exhibits increased IL-2Rβ binding. In some embodiments, an IL-2 mutein for use in the invention further comprises a substitution at position F42A. In some embodiments, the IL-2 mutein for use in the invention further comprises a substitution at position K43N. In some embodiments, the mutein comprises substitutions L80F, R81D, L85V, I86V, and I92F, and one or more substitutions selected from the group consisting of F42A, Y45A, and E62A, all as compared to wild-type human IL-2 (SEQ ID NO:2).

[0157] In some embodiments, the amino acid substitutions increasing IL-2Rβ binding affinity include: L80F, R81D, L85V, I86V, and I92F. In some embodiments, the amino acid substitutions that increase IL-2Rβ binding affinity include: L80F, R81D, L85V, 186V, and I92F.

[0158] In some embodiments, the subject IL-2 mutein having a greater binding affinity for IL-2Rβ as compared to wild-type human IL-2, includes the amino acid substitutions L80F, R81D, L85V, I86V, and I92F. In some embodiments, the IL-2 mutein has the amino acid sequence: APTSSSTKKTQLQLEHLLLDLQMILNGINNYKNPKLTRMLTFKFYMPKKATELKHLQCLEE ELKPLEEVLNLAQSKNFHFDPRDVVSNINVFVLELKGSETTFMCEYADETATIVEFLNRWI TFCQSIISTLT (SEQ ID NO:5; H9 as used in Example 1).

[0159] In some embodiments, the IL-2 mutein has increased capabilities to stimulate one or more signaling pathways that are dependent on IL-2Rβ/IL-2Rγ_{c} heterodimerization. In some embodiments, the subject IL-2 mutein has an enhanced capability to stimulate STAT5 phosphorylation in an IL-2Rβ+ cell as compared to wild-type human IL-2. In some embodiments, the IL-2 mutein stimulates STAT5 phosphorylation in an IL-2Rβ+ cell at a level that is 1%, 5%, 10%, 15%, 20%, 25%, 30%, 35%, 40%, 45%, 50%, 55%, 60%, 65%, 70%, 75%, 80%, 85%, 90%, 95% or more of the level that wild-type IL-2 stimulates STAT5 phosphorylation in the same cell. In some embodiments, the IL-2 mutein stimulates STAT5 phosphorylation in an IL-2Rβ+ cell at a level that is 105%, 110%, 115%, 120%, 125%, 130%, 135%, 140%, 145%, 150%, 155%, 160%, 165%, 170%, 175%, 180%, 185%, 190%, 195% or more as compared to the level that wild-type IL-2 stimulates STAT5 phosphorylation in the same cell. In some embodiments, the IL-2Rβ+ cell is a T cell. In particular embodiments, the T cell is a CD8⁺ T cell. In some embodiments, the CD8⁺ T cell is a freshly isolated CD8⁺ T cell. In other embodiments, the CD8⁺ T cell T cell is an activated CD8⁺ T cell. In other embodiments, the IL-2Rβ+ cell is a natural killer (NK) cell. In some embodiments, the IL-2 mutein comprises substitutions L80F, R81D, L85V, 186V, and I92F, as compared to wild-type human IL-2 (SEQ ID NO:2).

[0160] In some embodiments, the mutein has an enhanced capability to stimulate ERK1/ERK2 signaling in an IL-2Rβ+ cell as compared to wild-type human IL-2. In some embodiments, the IL-2 mutein stimulates pERK1/ERK2 signaling in an IL-2Rβ+ cell at a level that is 1%, 5%, 10%, 15%, 20%, 25%, 30%, 35%, 40%, 45%, 50%, 55%, 60%, 65%, 70%, 75%, 80%, 85%, 90%, 95% or more of the level that wild-type IL-2 stimulates pERK1/ERK2 signaling in the same cell. In some embodiments, the IL-2 mutein stimulates pERK1/ERK2 phosphorylation in an IL-2Rβ+ cell at a level that is 105%, 110%, 115%, 120%, 125%, 130%, 135%, 140%, 145%, 150%, 155%, 160%, 165%, 170%, 175%, 180%, 185%, 190%, 195% or more as compared to the level that wild-type IL-2 stimulates pERK1/ERK2 phosphorylation in the same cell. In some embodiments, the IL-2Rβ+ cell is a T cell. In particular embodiments, the T cell is a CD8⁺ T cell.

[0161] In some embodiments, the CD8⁺ T cell is a freshly isolated CD8⁺ T cell. In other embodiments, the CD8⁺ T cell T cell is an activated CD8⁺ T cell. In other embodiments, the IL-2Rβ+ cell is a natural killer (NK) cell. In some embodiments, the IL-2 mutein comprises substitutions L80F, R81D, L85V, I86V, and I92F, as compared to wild-type human IL-2 (SEQ ID NO:2). STAT5 and ERK1/2 signaling can be measured, for example, by phosphorylation of STAT5 and ERK1/2 using any suitable method known in the art. For example, STAT5 and ERK1/2 phosphorylation can be measured using antibodies specific for the phosphorylated version of these molecules in combination with flow cytometry analysis as described herein. In some embodiments, the mutein has an enhanced capability to stimulate PI 3-kinase signaling in a IL-2Rβ+ cell as compared to wild-type human IL-2. In some embodiments, the IL-2 mutein stimulates PI 3-kinase signaling in an IL-2Rβ+ cell at a level that is 1%, 5%, 10%, 15%, 20%, 25%, 30%, 35%, 40%, 45%, 50%, 55%, 60%, 65%, 70%, 75%, 80%, 85%, 90%, 95% or less of the level that wild-type IL-2 stimulates PI 3-kinase signaling in the same cell. In some embodiments, the IL-2 mutein stimulates PI 3-kinase signaling in an IL-2Rβ+ cell at a level that is 105%, 110%, 115%, 120%, 125%, 130%, 135%, 140%, 145%, 150%, 155%, 160%, 165%, 170%, 175%, 180%, 185%, 190%, 195% or more as compared to the level that wild-type IL-2 stimulates PI 3-kinase signaling phosphorylation in the same cell. In some embodiments, the IL-2Rβ+ cell is a T cell. In particular embodiments, the T cell is a CD8⁺ T cell. In some embodiments, the CD8⁺ T cell T cell is an activated CD8⁺ T cell. In other embodiments, the IL-2Rβ+ cell is a natural killer (NK) cell. In some embodiments, the IL-2 mutein comprises substitutions L80F, R81D, L85V, 186V, and I92F, as compared to wild-type human IL-2 (SEQ ID NO:2). PI3-kinase signaling can be measured using any suitable method known in the art. For example, PI 3-kinase signaling can be measured using antibodies that are specific for phospho-S6 ribosomal protein in conjunction with flow cytometry analysis as described herein.

[0162] In some embodiments the IL-2 mutein is a stimulator of IL-2 and/or IL-15 STAT5 phosphorylation in CD8⁺ T cells. In some embodiments, the mutein is a promoter of IL-2 and/or IL-15 induced proliferation of CD8⁺ T cells. In some embodiments, the mutein is a stimulator of IL-2 dependent, TCR-induced cell proliferation. In some embodiments, the IL-2 mutein comprises substitutions L80F, R81D, L85V, I86V, and I92F, as compared to wild-type human IL-2 (SEQ ID NO:2).

[0163] IL-2 promotes Th1, Th9, and Treg T cell differentiation and inhibits Th17 differentiation. Therefore, without being bound by any particular theory of operation, it is believed that IL-2 muteins that function as IL-2 superagonists are capable of promoting Th1, Th9, and/or Treg cell differentiation or inhibiting Th17 cell differentiation. In some embodiments, the IL-2 mutein is a promoter of IL-2 dependent Th1, Th9 and/or Treg differentiation. In some embodiments, the mutein is an inhibitor of Th17 differentiation. In some embodiments, the IL-2 mutein comprises substitutions L80F, R81D, L85V, I86V, and I92F, as compared to wild-type human IL-2 (SEQ ID NO:2).

[0164] In some embodiments, the IL-2 mutein signals less and/or independently of CD25 (for example, has reduced or ablated CD25 binding) as compared to wild-type human IL-2. In some embodiments the reduced and/or independent signaling with regard to CD25 allows for preferential activation of effector T-cells while limiting the stimulation of Tregs. In some embodiments the reduced and/or independent signaling with regard to CD25 allows for reduced toxicity. In some embodiments, the mutein comprises substitutions L80F, R81D, L85V, I86V, and I92F, and one or more substitutions selected from the group consisting of F42A, Y45A, and E62A, all as compared to wild-type human IL-2 (SEQ ID NO:2).

[0165] In some embodiments, the IL-2 mutein is capable of increasing and/or restoring responsiveness to anergic NK cells. In some embodiments, the IL-2 mutein is capable of increasing and/or restoring responsiveness to anergic NK cells in the tumor microenvironment. In some embodiments, the IL-2 mutein comprises substitutions L80F, R81D, L85V, 186V, and I92F, as compared to wild-type human IL-2 (SEQ ID NO:2).

[0166] In some embodiments the mutein is an inhibitor an inhibitor of IL-2 dependent activation of natural killer (NK) cells. IL-2 activation of NK cells can be measured by any suitable method known in the art, for example, by measuring IL-2 induced CD69 expression and/or cytotoxicity, as described herein.

[0167] In some embodiments, an increase in IL-2Rβ binding affinity is any binding affinity for IL-2Rβ that is greater than the wild-type human IL-2 binding affinity for IL-2Rβ. In some embodiments, the binding affinity is a 2-fold, 5-fold, 10-fold, 20-fold, 30-fold, 40-fold, 50-fold, 60-fold, 70-fold, 80-fold, 90-fold, 100-fold, 120-fold, 150-fold, 170-fold, 190-fold, 200-fold, 220-fold, 240-fold or more increase in binding affinity for IL-2Rβ as compared to the wild-type human IL-2 binding affinity for IL-2Rβ.

[0168] In some embodiments, an increase in binding capacity for IL-2Rβ is any binding capacity for IL-2Rβ that is greater than the wild-type human IL-2 binding capacity for IL-2Rβ. In some embodiments, the binding capacity is a 2-fold, 5-fold, 10-fold, 20-fold, 30-fold, 40-fold, 50-fold, 60-fold, 70-fold, 80-fold, 90-fold, 100-fold, 120-fold, 150-fold, 170-fold, 190-fold, 200-fold, 220-fold, 240-fold or more increase in binding capacity for IL-2Rβ as compared to the wild-type human IL-2 binding capacity for IL-2Rβ.

[0169] In some embodiments, the subject IL-2 mutein having a greater binding affinity for IL-2Rβ as compared to wild-type human IL-2 also exhibits reduced binding to CD25 and includes the amino acid substitutions F42A, L80F, R81D, L85V, I86V, and I92F. In some embodiments, the reduce binding affinity is about 220-fold, i.e., from about Kd of 6.6 nM for wild-type human IL-2 to about 1.4 μM for the mutein comprising F42A, L80F, R81D, L85V, I86V, and I92F. In some embodiments, the IL-2 mutein has the amino acid sequence:

(SEQ ID NO: 6; also referred to as H9-F42A)
APTSSSTKKTQLQLEHLLLDLQMILNGINNYKNPKLTRMLTAKFYMPKK
ATELKHLQCLEEELKPLEEVLNLAQSKNFHFDPRDVVSNINVFVLELKG
SETTFMCEYADETATIVEFLNRWITFCQSIISTLT.

[0170] In some embodiments, the subject IL-2 mutein having a greater binding affinity for IL-2Rβ as compared to wild-type human IL-2 also exhibits reduced binding to CD25 and includes the amino acid substitutions K43N, L80F, R81D, L85V, I86V, and I92F. In some embodiments, the reduce binding affinity is due to allowing for glycosylation at position 43 with the K43N substitution. By substituting lysine for asparagine (K43N), CD25 binding is reduced and/or ablated in the IL-2 mutein comprising the amino acid substitutions K43N, L80F, R81D, L85V, 186V, and I92F. In some embodiments, the IL-2 mutein has the amino acid sequence:

(SEQ ID NO: 7; also referred to as H9-K43N)
APTSSSTKKTQLQLEHLLLDLQMILNGINNYKNPKLTRMLTFNFYMPKK
ATELKHLQCLEEELKPLEEVLNLAQSKNFHFDPRDVVSNINVFVLELKG
SETTFMCEYADETATIVEFLNRWITFCQSIISTLT.

[0171] In some embodiments, a reduction in binding affinity for CD25 is any binding affinity for CD25 that is less than the wild-type human IL-2 binding affinity. In some embodiments, the binding affinity is a 10-fold, 20-fold, 30-fold, 40-fold, 50-fold, 60-fold, 70-fold, 80-fold, 90-fold, 100-fold, 120-fold, 150-fold, 170-fold, 190-fold, 200-fold, 220-fold, 240-fold or more decrease in binding affinity for CD25 as compared to the wild-type human IL-2 binding affinity for CD25.

[0172] In some embodiments, the subject IL-2 mutein having a greater binding affinity for IL-2Rβ and a reduced binding affinity for CD25 as compared to wild-type human IL-2 includes the amino acid substitutions F42A, Y45A L80F, R81D, L85V, I86V, and I92F. In some embodiments, the IL-2 mutein has the amino acid sequence:

(SEQ ID NO: 8; H9-F42A/Y45A; H9-FYAA)
APTSSSTKKTQLQLEHLLLDLQMILNGINNYKNPKLTRMLTAKFAMPKK
ATELKHLQCLEEELKPLEEVLNLAQSKNFHFDPRDVVSNINVFVLELKG
SETTFMCEYADETATIVEFLNRWITFCQSIISTLT.

[0173] In some embodiments, the subject IL-2 mutein having a greater binding affinity for IL-2Rβ and a reduced binding affinity for CD25 as compared to wild-type human IL-2 includes the amino acid substitutions F42A, E62A L80F, R81D, L85V, I86V, and I92F. In some embodiments, the IL-2 mutein has the amino acid sequence:

(SEQ ID NO: 9; H9-F42A/E62A; H9-FEAA)
APTSSSTKKTQLQLEHLLLDLQMILNGINNYKNPKLTRMLTAKFYMPKK
ATELKHLQCLEEALKPLEEVLNLAQSKNFHFDPRDVVSNINVFVLELKG
SETTFMCEYADETATIVEFLNRWITFCQSIISTLT.

[0174] In some embodiments, the subject IL-2 mutein having a greater binding affinity for IL-2Rβ and a reduced binding affinity for CD25 as compared to wild-type human IL-2 includes the amino acid substitutions F42A, Y45A, E62A, L80F, R8TD, L85V, 186V, and I92F. In some embodiments, the IL-2 mutein has the amino acid sequence:

(SEQ ID NO: 10; H9-F42A/Y45A/E62A; H9-FYEAAA)
APTSSSTKKTQLQLEHLLLDLQMILNGINNYKNPKLTRMLTAKFAMPKK
ATELKHLQCLEEALKPLEEVLNLAQSKNFHFDPRDVVSNINVFVLELKG
SETTFMCEYADETATIVEFLNRWITFCQSIISTLT.

[0175] In some embodiments, the IL-2 mutein sequence is 90% identical to any one of SEQ ID NO:2 or SEQ ID NO:6 through SEQ ID NO: 10 or SEQ ID NO:16. In some embodiments, the IL-2 mutein sequence is 95% identical to any one of SEQ ID NO:2 or SEQ ID NO:6 through SEQ ID NO: 10. In some embodiments, the IL-2 mutein sequence is 98% identical to any one of SEQ ID NO:2 or SEQ ID NO:6 through SEQ ID NO: 10. In some embodiments, the IL-2 mutein sequence is 99% identical to any one of SEQ ID NO:2 or SEQ ID NO:6 through SEQ ID NO: 10.

[0176] Further exemplary IL-2 sequences are provided in the table below.

TABLE 2
List of Exemplary IL-2 Muteins

| Amino Acid Sequences | |
|---|---|
| SEQ ID NO: | |
| (Information) | Amino acid sequence |
| SEQ ID NO: 6 | APTSSSTKKTQLQLEHLLLDLQMILNGINNYKNPKL |
| (also referred to as H9-F42A) | TRMLTAKFYMPKKATELKHLQCLEEELKPLEEVLN |
| | LAQSKNFHFDPRDVVSNINVFVLELKGSETTFMCE |
| | YADETATIVEFLNRWITFCQSIISTLT ( |
| (SEQ ID NO: 7 | APTSSSTKKTQLQLEHLLLDLQMILNGINNYKNPKL |
| (also referred to as H9-K43N) | TRMLTFNFYMPKKATELKHLQCLEEELKPLEEVLN |
| | LAQSKNFHFDPRDVVSNINVFVLELKGSETTFMCE |
| | YADETATIVEFLNRWITFCQSIISTLT |
| SEQ ID NO: 8 | APTSSSTKKTQLQLEHLLLDLQMILNGINNYKNPKL |
| (H9-F42A/Y45A; H9-FYAA) | TRMLTAKFAMPKKATELKHLQCLEEELKPLEEVLN |
| | LAQSKNFHFDPRDVVSNINVFVLELKGSETTFMCE |
| | YADETATIVEFLNRWITFCQSIISTLT |
| SEQ ID NO: 9) | APTSSSTKKTQLQLEHLLLDLQMILNGINNYKNPKL |
| (H9-F42A/E62A; H9-FEAA) | TRMLTAKFYMPKKATELKHLQCLEEALKPLEEVLN |
| | LAQSKNFHFDPRDVVSNINVFVLELKGSETTFMCE |
| | YADETATIVEFLNRWITFCQSIISTLT |
| SEQ ID NO: 10; | APTSSSTKKTQLQLEHLLLDLQMILNGINNYKNPKL |
| H9-F42A/Y45A/E62A; H9-FYEAAA). | TRMLTAKFAMPKKATELKHLQCLEEALKPLEEVLN |
| | LAQSKNFHFDPRDVVSNINVFVLELKGSETTFMCE |
| | YADETATIVEFLNRWITFCQSIISTLT |
| SEQ ID NO: 20 | APTSSSTKKTQLQLEHLLLDLQMILNGINNYKNPKLTRMLTF |
| | KFYMPKKATELKHLQCLEEELKPLEEVLNLARSKNFHLRPRD |
| | LISNINVIVLELKGSETTFMCEYADETATIVEFLNRWITFCQ |
| | SIISTLT |
| SEQ ID NO: 21 | APTSSSTKKTQLQLEHLLLDLQMILNGINNYKNPKLTRMLTF |
| | KFYMPKKATELKHLQCLEEELKPLEEVLNLARSKNFHLRPRD |
| | VISNINVIVLELKGSETTFMCEYADETATIVEFLNRWITFCQ |
| | SIISTLT |
| SEQ ID NO: 22 | APTSSSTKKTQLQLEHLLLDLQMILNGINNYKNPKLTRMLTF |
| | KFYMPKKATELKHLQCLEEELKPLEEVLNLARSKNFHLIPRD |
| | VISNINVIVLELKGSETTFMCEYADETATIVEFLNRWITFCQ |
| | SIISTLT |
| SEQ ID NO: 23 | APTSSSTKKTQLQLEHLLLDLQMILNGINNYKNPKLTRMLTF |
| | KFYMPKKATELKHLQCLEEELKPLEEVLNLAHSKNFHLTPRD |
| | VVSNINVFILELKGSETTFMCEYADETATIVEFLNRWITFCQ |
| | SIISTLT |
| SEQ ID NO: 24 | APTSSSTKKTQLQLEHLLLDLQMILNGINNYKNPKLTRMLTF |
| | KFYMPKKATELKHLQCLEEELKPLEEVLNLANSKNFHFDPRD |
| | VVSNVNVFVLELKGSETTFMCEYADETATIVEFLNRWITFCQ |
| | SIISTLT |
| SEQ ID NO: 25 | APTSSSTKKTQLQLEHLLLDLQMVLNGINNYKNPKLTRMLTF |
| | KFYMPKKATELKHLQCLEEELKPLEEVLNLASSKNFHFDPRD |
| | VVSNINVFVLELKGSETTFMCEYADETATIVEFLNRWITFCQ |
| | SIISTLT |
| SEQ ID NO: 26 | APTSSSTKKTQLQLEHLLLDLQMILNGINNYKNPKLTRMLTF |
| | KFYMPKKATELKHLQCLEEELKHLEEVLNLANSKNFHVTPRD |
| | VVSNINVFVLELKGSETTFMCEYADETATIVEFLNRWITFCQ |
| | SIISTLT |
| SEQ ID NO: 27 | APTSSSTKKTQLQLEHLLLDLQMILNGINNYKNPKLTRMLTF |
| | KFYMPKKATELKHLQCLEEELKPLEEVLNLAHSKNFHFDPRD |
| | VVSNINVFVLELKGSETTFMCEYADETATIVEFLNRWITFCQ |
| | SIISTLT |
| SEQ ID NO: 28 | APTSSSTKKTQLQLEHLLLDLQMILNGINNYKNPKLTRMLTF |
| | KFYMPKKATELKHLQCLEEELKPLEEVLNLASSKNFHFDPRD |
| | VVSNINVFVLELKGSETTFMCEYADETATIVEFLNRWITFCQ |
| | SIISTLT |
| SEQ ID NO: 29 | APTSSSTKKTQLQLEHLLLDLQMILNGINNYKNPKLTRMLTF |
| | KFYMPKKATELKHLQCLEEELKPLEEVLNLANSKNFHFDPRD |
| | VVSNINVFVLELKGSETTFMCEYADETATIVEFLNRWITFCQ |
| | SIISTLT |
| SEQ ID NO: 30 | APTSSSTKKTQLQLEHLLLDLQMILNGINNYKNPKLTRMLTF |
| | KFYMPKKATELKHLQCLEEELKPLEEVLNLASSKNFHLTPRD |
| | VISNINVFVLELKGSETTFMCEYADETATIVEFLNRWITFCQ |
| | SIISTLT |
| SEQ ID NO: 31 | APTSSSTKKTQLQLEHLLLDLQMILNGINNYKNPKLTRMLTF |
| | KFYMPKKATELKHLQCLEEELKPLEEVLNLAQSKNFHFDPRD |
| | VVSNINVFVLELKGSETTFMCEYADETATIVEFLNRWITFCQ |
| | SIISTLT |
| SEQ ID NO: 32 | H9D10 |
| IL-2 agonist | APTSSSTKKTQLQLEHLLLDLQMILNGINNYKNPKLTRMLTFK |
| | FYMPKKATELKHLQCLEEELKPLEEVLNLAHSKNFHFDPRDVVSNI |
| | NVFVLELKGSETTFMCEYADETATIVEFLNRWITFCQSIISTLT |
| SEQ ID NO: 33 | H9E10 |
| IL-2 agonist | APTSSSTKKTQLQLEHLLLDLQMILNGINNYKNPKLTRMLTFKFYM |
| | PKKATELKHLQCLEEELKPLEEVLNLASSKNFHFDPRDVVSNINVF |
| | VLELKGSETTFMCEYADETATIVEFLNRWITFCQSIISTLT |
| SEQ ID NO: 34 | H9G8 |
| IL-2 agonist | APTSSSTKKTQLQLEHLLLDLQMILNGINNYKNPKLTRMLTFKFYM |
| | PKKATELKHLQCLEEELKPLEEVLNLANSKNFHFDPRDVVSNINVF |
| | VLELKGSETTFMCEYADETATIVEFLNRWITFCQSIISTLT |
| SEQ ID NO: 35 | H9B1 |
| IL-2 agonist | APTSSSTKKTQLQLEHLLLDLQMILNGINNYKNPKLTRMLTFKFYM |
| | PKKATELKHLQCLEEELKPLEEVLNLANSKNFHFDPRDVVSNVNVF |
| | VLELKGSETTFMCEYADETATIVEFLNRWITFCQSIISTLT |
| SEQ ID NO: 146 | APTSSSTKKTQLQLEHLLLDLQMILNGINNYKNPKLTRMLTAKFYM |
| (F42A, E62A, L80F, R81D, L85V, | PKKATELKHLQCLEEALKPLEEVLNLAQSKNFHFDPRDVVSNINVF |
| I86V, 192F, and C125S) | VLELKGSETTFMCEYADETATIVEFLNRWITFSQSIISTLT |

[0177] B. IL-2 Mutein Fusion Proteins

[0178] The IL-2 muteins can be prepared as fusion or chimeric polypeptides that include a subject IL-2 mutein and a heterologous polypeptide (i.e., a polypeptide that is not IL-2 or a mutant thereof) (see, e.g., U.S. Pat. No. 6,451,308), including for example, bispecific IL-2 cytokine fusions. Exemplary heterologous polypeptides can increase the circulating half-life of the chimeric polypeptide in vivo, and may, therefore, further enhance the properties of the mutant IL-2 polypeptides. In various embodiments, the polypeptide that increases the circulating half-life may be a serum albumin, such as human serum albumin, PEG, PEG-derivatives, or the Fc region of the IgG subclass of antibodies that lacks the IgG heavy chain variable region. Exemplary Fc regions can include a mutation that inhibits complement fixation and Fc receptor binding, or it may be lytic, i.e., able to bind complement or to lyse cells via another mechanism, such as antibody-dependent complement lysis (ADCC; U.S. Ser. No. 08/355,502 filed Dec. 12, 1994).

[0179] The “Fc region” can be a naturally occurring or synthetic polypeptide that is homologous to the IgG C-terminal domain produced by digestion of IgG with papain. IgG Fc has a molecular weight of approximately 50 kDa. The mutant IL-2 polypeptides can include the entire Fc region, or a smaller portion that retains the ability to extend the circulating half-life of a chimeric polypeptide of which it is a part. In addition, full-length or fragmented Fc regions can be variants of the wild-type molecule. In some embodiments, the IL-2 mutein fusion protein (e.g., an IL-2 mutein as described herein) includes an IgG1, IgG2, IgG3, or IgG4 Fc region (see, for example, sequences in FIG. 2A-2B). In some embodiments, the Fc region comprises the substitution N297A.

[0180] In some embodiments, the IL-2 mutein is linked directly or indirectly to the heterologous fusion polypeptide.

[0181] In some embodiments, the IL-2 mutein is linked directly to the Fc region. In some embodiments, the IL-2 mutein is linked to the Fc region via a linker peptide, such as GGGGS. In some embodiments, the linker is (GGGGS)n, wherein n is an integer between 1 and 10. In some embodiments, the linker is GGGGS. In some embodiments, the linker is GGGGSGGGGS (SEQ ID NO: 16). In some embodiments, the linker is GGGGSGGGGSGGGGS (SEQ ID NO:17). In some embodiments, the linker is GGGGSGGGGSGGGGSGGGGS (SEQ ID NO:18). In some embodiments, the linker is GGGGSGGGGSGGGGSGGGGS (SEQ ID NO: 19). In some embodiments, the linker contains one or more protease cleavage sites (e.g., is a protease cleavable linker). Linkers additionally can contain one or more protease cleavage sites or be sensitive to cleavage via oxidation and/or reduction. Peptide linkers that are susceptible to cleavage by enzymes of the complement system, urokinase, tissue plasminogen activator, trypsin, plasmin, caspases, kallikreins, cathepsins, legumain, MMPs, thrombin, urokinase-type plasminogen activator (uPA), matriptase, or another enzyme having proteolytic activity may be used in one example. According to another example, a linker may comprise disulfide bonds (for example, the disulfide bonds on a cysteine molecule). According to another example, a linker may comprise a protease-cleavable Val-Cit (VC) linker, a Phe-Arg linker, a Val-Lys linker, a Val-Ala linker, a Val-Arg linker, a Val-Leu-Lys linker, a Gly-Phe-Leu-Gly linker, an Ala-Phe-Lys linker, a pol-L-lysine linker, a beta-Ala-Leu-Ala-Leu linker, an Arg-Arg-Ala-Leu-Ala-Leu linker, a peptidomimetic linker, a legumain-cleavable Ala-Ala-Asn tripeptide linker, a peptide linker that is cleaved by cathepsin B and other lysosomal proteases, such as Gly-Phe-Leu-Gly and Ala-Leu-Ala-Leu, a caspase 3 DEVD sequence, or a self-immolative linker. For example, linkers disclosed in Poreba, M, FEBS J. 287(10):1936-1969 (2020), incorporated by reference herein, are contemplated by the present disclosure. Since many tumors naturally release high levels of glutathione (a reducing agent) this can reduce the disulfide bonds with subsequent release of the cargo moiety at the site of delivery. In some embodiments, the linkers is a protease-cleavable linkers is a linker cleavable by a matrix metalloprotease (MMP). MMPs are overexpressed in situ at tumors, and linkers cleavable in such contexts are contemplated by the presentation disclosure. For example, linkers disclosed in Hsu, E. J., et al., Nat. Commun. 12(2768):1-13 (2021), incorporated by reference herein, are contemplated by the present disclosure. In some embodiments, the MMP linker sequence is selected from the group consisting of SGARYRWLTA (SEQ ID NO: 234), SGRSYAILTA (SEQ ID NO: 235), SRSGRSPAIFTATG (SEQ ID NO: 236), GSSGRSPAIFTAGS (SEQ ID NO: 237), and SGFIANPVTA (SEQ ID NO: 238). In some embodiments, the MMP linker sequence is SGARYRWLTA. In some embodiments, the MMP linker sequence is SGRSYAILTA. In some embodiments, the MMP linker sequence is SRSGRSPAIFTATG. In some embodiments, the MMP linker sequence is GSSGRSPAIFTAGS. In some embodiments, the MMP linker sequence is SGFIANPVTA.

[0182] The Fc region can be “lytic” or “non-lytic,” but is typically non-lytic. A non-lytic Fc region typically lacks a high affinity Fc receptor binding site and a C′1q binding site. The high affinity Fc receptor binding site of murine IgG Fc includes the Leu residue at position 235 of IgG Fc. Thus, the Fc receptor binding site can be destroyed by mutating or deleting Leu 235. For example, substitution of Glu for Leu 235 inhibits the ability of the Fc region to bind the high affinity Fc receptor. The murine C′1q binding site can be functionally destroyed by mutating or deleting the Glu 318, Lys 320, and Lys 322 residues of IgG. For example, substitution of Ala residues for Glu 318, Lys 320, and Lys 322 renders IgG1 Fc unable to direct antibody-dependent complement lysis. In contrast, a lytic IgG Fc region has a high affinity Fc receptor binding site and a C′1q binding site. The high affinity Fc receptor binding site includes the Leu residue at position 235 of IgG Fc, and the C′1q binding site includes the Glu 318, Lys 320, and Lys 322 residues of IgG1. Lytic IgG Fc has wild-type residues or conservative amino acid substitutions at these sites. Lytic IgG Fc can target cells for antibody dependent cellular cytotoxicity or complement directed cytolysis (CDC). Appropriate mutations for human IgG are also known (see, e.g., Morrison et al., The Immunologist 2:119-124, 1994; and Brekke et al., The Immunologist 2: 125, 1994).

[0183] In other embodiments, the chimeric polypeptide can include a subject IL-2 mutein and a polypeptide that functions as an antigenic tag, such as a FLAG sequence. FLAG sequences are recognized by biotinylated, highly specific, anti-FLAG antibodies, as described herein (see also Blanar et al., Science 256:1014, 1992; LeClair et al., Proc. Natl. Acad. Sci. USA 89:8145, 1992). In some embodiments, the chimeric polypeptide further comprises a C-terminal c-myc epitope tag.

[0184] In other embodiments, the chimeric polypeptide includes the mutant IL-2 polypeptide and a heterologous polypeptide that functions to enhance expression or direct cellular localization of the mutant IL-2 polypeptide, such as the Aga2p agglutinin subunit (see, e.g., Boder and Wittrup, Nature Biotechnol. 15:553-7, 1997).

[0185] In other embodiments, a chimeric polypeptide including a mutant IL-2 and an antibody or antigen-binding portion thereof can be generated. The antibody or antigen-binding component of the chimeric protein can serve as a targeting moiety. For example, it can be used to localize the chimeric protein to a particular subset of cells or target molecule. Methods of generating cytokine-antibody chimeric polypeptides are described, for example, in U.S. Pat. No. 6,617,135.

[0186] In some embodiments, the chimeric polypeptide comprises a fusion to an antibody or an antigen-binding portion thereof that disrupts the interaction between the PD-1 receptor and its ligand, PD-L1, and/or is an antibody to a component of the PD-1/PD-L1 signaling pathway. Antibodies known in the art which bind to PD-1 and disrupt the interaction between the PD-1 and its ligand, PD-L1, and stimulate an anti-tumor immune response, are suitable for use in the chimeric polypeptides disclosed herein. In some embodiments, the antibody or antigen-binding portion thereof binds specifically to PD-1. For example, antibodies that target PD-1 and which can find used in the present invention include, e.g., but are not limited to nivolumab (BMS-936558, Bristol-Myers Squibb), pembrolizumab (lambrolizumab, MK03475 or MK-3475, Merck), humanized anti-PD-1 antibody JS001 (ShangHai JunShi), monoclonal anti-PD-1 antibody TSR-042 (Tesaro, Inc.), Pidilizumab (anti-PD-1 mAb CT-011, Medivation), anti-PD-1 monoclonal Antibody BGB-A317 (BeiGene), and/or anti-PD-1 antibody SHR-1210 (ShangHai HengRui), human monoclonal antibody REGN2810 (cemiplimab, Regeneron), human monoclonal antibody MDX-1106 (Bristol-Myers Squibb), and/or humanized anti-PD-1 IgG4 antibody PDR001 (Novartis). In some embodiments, the PD-1 antibody is from clone: RMP1-14 (rat IgG)-BioXcell cat #BP0146. Other suitable antibodies include anti-PD-1 antibodies disclosed in U.S. Pat. No. 8,008,449, herein incorporated by reference. In some embodiments, the antibody or antigen-binding portion thereof binds specifically to PD-L1 and inhibits its interaction with PD-1, thereby increasing immune activity. Any antibodies known in the art which bind to PD-L1 and disrupt the interaction between the PD-1 and PD-L1, and stimulates an anti-tumor immune response, are suitable for use in the chimeric polypeptides disclosed herein. For example, antibodies that target PD-L1 and are in clinical trials, include BMS-936559 (Bristol-Myers Squibb) and MPDL3280A (Genetech). Other suitable antibodies that target PD-L1 are disclosed in U.S. Pat. No. 7,943,743, herein incorporated by reference. It will be understood by one of ordinary skill that any antibody which binds to PD-1 or PD-L1, disrupts the PD-1/PD-L1 interaction, and stimulates an anti-tumor immune response, is suitable for use in the chimeric polypeptides disclosed herein. In some embodiments, the chimeric polypeptide comprises a fusion to an anti-PD-1 antibody. In some embodiments, the chimeric polypeptide comprises a fusion to an anti-PD-L1 antibody.

[0187] In some embodiments, the chimeric polypeptide comprises a fusion to an antibody or an antigen-binding portion thereof that targets CTLA-4 and disrupts its interaction with CD80 and CD86. Exemplary antibodies that target CTLA-4 include ipilimumab (MDX-010, MDX-101, Bristol-Myers Squibb), which is FDA approved, and tremelimumab (ticilimumab, CP-675, 206, Pfizer), currently undergoing human trials. Other suitable antibodies that target CTLA-4 are disclosed in WO 2012/120125, U.S. Pat. Nos. 6,984,720, 6,682,7368, and U.S. Patent Applications 2002/0039581, 2002/0086014, and 2005/0201994, herein incorporated by reference. It will be understood by one of ordinary skill that any antibody which binds to CTLA-4, disrupts its interaction with CD80 and CD86, and stimulates an anti-tumor immune response, is suitable for use in the chimeric polypeptides disclosed herein. In some embodiments, the chimeric polypeptide comprises a fusion to an anti-CTLA-4 antibody.

[0188] In some embodiments, the chimeric polypeptide comprises a fusion to an antibody or an antigen-binding portion thereof that targets LAG-3 and disrupts its interaction with MHC class II molecules. An exemplary antibody that targets LAG-3 is IMP321 (Immutep), currently undergoing human trials. Other suitable antibodies that target LAG-3 are disclosed in U.S. Patent Application 2011/0150892, herein incorporated by reference. It will be understood by one of ordinary skill that any antibody which binds to LAG-3, disrupts its interaction with MHC class II molecules, and stimulates an anti-tumor immune response, is suitable for use in the chimeric polypeptides disclosed herein. In some embodiments, the chimeric polypeptide comprises a fusion to an anti-LAG-3 antibody.

[0189] In some embodiments, the chimeric polypeptide comprises a fusion to an antibody or an antigen-binding portion thereof that targets B7-H3 or B7-H4. The B7 family does not have any defined receptors but these ligands are upregulated on tumor cells or tumor-infiltrating cells. An exemplary antibody that targets B7-H3 is MGA271 (Macrogenics) is currently undergoing human trials. Other suitable antibodies that target B7 family members are disclosed in U.S. Patent Application 2013/0149236, herein incorporated by reference. It will be understood by one of ordinary skill that any antibody which binds to B7-H3 or H4, and stimulates an anti-tumor immune response, is suitable for use in the chimeric polypeptides disclosed herein. In some embodiments, the chimeric polypeptide comprises a fusion to an anti-B7-H3 or B7-H4 antibody.

[0190] In some embodiments, the chimeric polypeptide comprises a fusion to an antibody or an antigen-binding portion thereof that targets TIM-3 and disrupts its interaction with galectin 9. Suitable antibodies that target TIM-3 are disclosed in U.S. Patent Application 2013/0022623, herein incorporated by reference. It will be understood by one of ordinary skill that any antibody which binds to TIM-3, disrupts its interaction with galectin 9, and stimulates an anti-tumor immune response, is suitable for use in the chimeric polypeptides disclosed herein. In some embodiments, the chimeric polypeptide comprises a fusion to an anti-TIM-3 antibody.

[0191] In some embodiments, the chimeric polypeptide comprises a fusion to an antibody or an antigen-binding portion thereof that targets 4-1BB/CD137 and disrupts its interaction with CD137L. It will be understood by one of ordinary skill that any antibody which binds to 4-1BB/CD137, disrupts its interaction with CD137L or another ligand, and stimulates an anti-tumor immune response or an immune stimulatory response that results in anti-tumor activity overall, is suitable for use in the chimeric polypeptides disclosed herein. In some embodiments, the chimeric polypeptide comprises a fusion to an anti-4-1BB/CD137 antibody.

[0192] In some embodiments, the chimeric polypeptide comprises a fusion to an antibody or an antigen-binding portion thereof that targets GITR and disrupts its interaction with its ligand. It will be understood by one of ordinary skill that any antibody which binds to GITR, disrupts its interaction with GITRL or another ligand, and stimulates an anti-tumor immune response or an immune stimulatory response that results in anti-tumor activity overall, is suitable for use in the chimeric polypeptides disclosed herein. In some embodiments, the chimeric polypeptide comprises a fusion to an anti-GITR antibody.

[0193] In some embodiments, the chimeric polypeptide comprises a fusion to an antibody or an antigen-binding portion thereof that targets OX40 and disrupts its interaction with its ligand. It will be understood by one of ordinary skill that any antibody which binds to OX40, disrupts its interaction with OX40L or another ligand, and stimulates an anti-tumor immune response or an immune stimulatory response that results in anti-tumor activity overall, is suitable for use in the chimeric polypeptides disclosed herein. In some embodiments, the chimeric polypeptide comprises a fusion to an anti-OX40 antibody.

[0194] In some embodiments, the chimeric polypeptide comprises a fusion to an antibody or an antigen-binding portion thereof that targets CD40 and disrupts its interaction with its ligand. It will be understood by one of ordinary skill that any antibody which binds to CD40, disrupts its interaction with its ligand, and stimulates an anti-tumor immune response or an immune stimulatory response that results in anti-tumor activity overall, is suitable for use in the chimeric polypeptides disclosed herein. In some embodiments, the chimeric polypeptide comprises a fusion to an anti-CD40 antibody

[0195] In some embodiments, the chimeric polypeptide comprises a fusion to an antibody or an antigen-binding portion thereof that targets ICOS and disrupts its interaction with its ligand. It will be understood by one of ordinary skill that any antibody which binds to ICOS, disrupts its interaction with its ligand, and stimulates an anti-tumor immune response or an immune stimulatory response that results in anti-tumor activity overall, is suitable for use in the chimeric polypeptides disclosed herein. In some embodiments, the chimeric polypeptide comprises a fusion to an anti-ICOS antibody.

[0196] In some embodiments, the chimeric polypeptide comprises a fusion to an antibody or an antigen-binding portion thereof that targets CD28 and disrupts its interaction with its ligand. It will be understood by one of ordinary skill that any antibody which binds to CD28, disrupts its interaction with its ligand, and stimulates an anti-tumor immune response or an immune stimulatory response that results in anti-tumor activity overall, is suitable for use in the chimeric polypeptides disclosed herein. In some embodiments, the chimeric polypeptide comprises a fusion to an anti-CD28 antibody.

[0197] In some embodiments, the chimeric polypeptide comprises a fusion to an antibody or an antigen-binding portion thereof that targets IFNα and disrupts its interaction with its ligand. It will be understood by one of ordinary skill that any antibody which binds to IFNα, disrupts its interaction with its ligand, and stimulates an anti-tumor immune response or an immune stimulatory response that results in anti-tumor activity overall, is suitable for use in the chimeric polypeptides disclosed herein. In some embodiments, the chimeric polypeptide comprises a fusion to an anti-IFNα antibody.

[0198] In some embodiments, the chimeric polypeptide comprises a fusion to a tumor antigen or polypeptide targeting a tumor antigen. Generally, tumor antigens allow for distinguishing the tumor cells from their normal cellular counterparts and can include, for example, tumor-specific antigens (TSA) as well as tumor-associated antigens (TAA). In some embodiments, a tumor antigen is a protooncogene and/or a tumor suppressor, as well as overexpressed or aberrantly expressed cellular proteins, tumor antigens produced by oncogenic viruses, oncofetal antigens, altered cell surface glycolipids and glycoproteins, and/or cell type-specific differentiation antigens. Such tumor antigens can include melanoma antigens, cancer-testis antigens, epithelial tumor antigens, cell cycle regulatory proteins, prostate specific antigens (including prostate carcinoma antigens, such as for example those disclosed in U.S. Pat. No. 5,538,866) lymphoma (U.S. Pat. Nos. 4,816,249; 5,068,177; and 5,227,159). Tumor antigens can include for example, but are not limited to, HMW mucins bound by 2G3 and 369F10, c-erbB-2 related tumor antigen (an approximately 42 kD or 55 kD glycoprotein), the approximately 40, 60, 100 and 200 kD antigens bound by 113F1, 9-O-acetyl GD3, p97, alphafetoprotein (AFP) (for example, for germ cell tumors and/or hepatocellular carcinoma), carcinoembryonic antigen (CEA) (for example, for bowel cancers occasional lung or breast cancer), CA-125 (for example, for ovarian cancer), MUC-1 (for example, for breast cancer), epithelial tumor antigen (ETA) (for example, for breast cancer), tyrosinase (for example, for malignant melanoma), melanoma-associated antigen (MAGE) (for example, for malignant melanoma), cancer/testis antigen 1 (CTAG1B), melanoma-associated antigen 1 (MAGEA1), abnormal Ras products, abnormal p53 products, overexpression of cyclins (including, for example, cyclin B1), mutation in fibronectin, posttranslational alteration in the MUC1 glycoprotein, secreted tumor antigens (including, for example, gangliosides).

[0199] Other fusions can include fusions with pro-apoptotic payloads. Such exemplary sequences are provided in the table below. In some embodiments, and IL-2 mutein as described herein is fused to a pro-apoptotic payload, for example a BAD, BAX, BAR, BIK, and/or BIDsequence. In some embodiments, the pro-apoptotic payload is a Bcl-2 domain containing peptide and/or a susequence of a BAD, BAX, BAR, BIK, and/or BID sequence. Exemplary pro-apoptotic fusions are provided below, in Table 3.

TABLE 3
List of Selected Pro-Apoptotic Fusion Partners

| SEQ ID NO: | |
|---|---|
| (Information) | Amino acid sequence |
| SEQ ID NO: 38 | MFQIPEFEPSEQEDSSSAERGLGPSPAGDGPSGSGKHHRQ |
| BAD amino acid sequence | APGLLWDASHQQEQPTSSSHHGGAGAVEIRSRHSAYPAGT |
| | EDDEGMGEEPSPFRGRSRAAPPNLWAAQRYGRELRRMSDE |
| | FVDSFKKGLPRPKSAGTATQMRQSSSWTRVFQSWWDRNLG |
| | RGSSAPSQ |
| SEQ ID NO: 39 | MFQIPEFEPSEQEDSSSAERGLGPSPAGDGPSGSGKHHRQ |
| >HsBAD_Q92934-1(UniProtKB) | APGLLWDASHQQEQPTSSSHHGGAGAVEIRSRHSSYPAGT |
| | EDDEGMGEEPSPFRGRSRSAPPNLWAAQRYGRELRRMSDE |
| | FVDSFKKGLPRPKSAGTATQMRQSSSWTRVFQSWWDRNLG |
| | RGSSAPSQ |
| SEQ ID NO: 40 | MDGSGEQPRGGGPTSSEQIMKTGALLLQGFIQDRAGRMGG |
| >HsBAX_Q07812-1(UniProtKB) | EAPELALDPVPQDASTKKLSECLKRIGDELDSNMELQRMI |
| | AAVDTDSPREVFFRVAADMFSDGNFNWGRVVALFYFASKL |
| | VLKALCTKVPELIRTIMGWTLDFLRERLLGWIQDQGGWDG |
| | LLSYFGTPTWQTVTIFVAGVLTASLTIWKKMG |
| SEQ ID NO: 41 | MASGQGPGPPRQECGEPALPSASEEQVAQDTEEVFRSYVF |
| >HsBAK1_Q16611-1(UniProtKB) | YRHQQEQEAEGVAAPADPEMVTLPLQPSSTMGQVGRQLAI |
| | IGDDINRRYDSEFQTMLQHLQPTAENAYEYFTKIATSLFE |
| | SGINWGRVVALLGFGYRLALHVYQHGLTGF |
| | LGQVTRFVVDFMLHHCIARWIAQRGGWVAALNLGNGPILN |
| | VLVVLGVVLL |
| | GQFVVRRFFKS |
| SEQ ID NO: 42 | MSEVRPLSRDILMETLLYEQLLEPPTMEVLGMTDSEEDLD |
| >HsBIK_Q13323-1(UniProtKB) | PMEDFDSLEC |
| | MEGSDALALRLACIGDEMDVSLRAPRLAQLSEVAMHSLGL |
| | AFTYDQTEDI |
| | RDVLRSFMDGFTTLKENIMRFWRSPNPGSWVSCEQVLLAL |
| | LLLLALLLPL |
| | LSGGLHLLLK |
| SEQ ID NO: 43 | MDCEVNNGSSLRDECITNLLVFGFLQSCSDNSFRRELDAL |
| >HsBID_P55957-1(UniProtKB) | GHELPVLAPQ |
| | WEGYDELQTDGNRSSHSRLGRIEADSESQEDIIRNIARHL |
| | AQVGDSMDRS |
| | IPPGLVNGLALQLRNTSRSEEDRNRDLATALEQLLQAYPR |
| | DMEKEKTMLV |
| | LALLLAKKVASHTPSLLRDVFHTTVNFINQNLRTYVRSLA |
| | RNGMD |

[0200] In some particular embodiments, an IL-2 antagonist can be fused to a pro-apoptotic payload for the treatment of cancer. An “antagonist” is a compound that opposes the actions of an agonist, e.g. by preventing, reducing, inhibiting, or neutralizing the activity of an agonist. An “antagonist” can also prevent, inhibit, or reduce constitutive activity of a target, e.g., a target receptor, even where there is no identified agonist. While typically IL-2 muteins with agonist or superagonist activity as compared to wild-type IL-2 are employed with the cancer treatment methods of the present invention, IL-2 muteins with antagonistic properties can be employed when such antagonists are fused to a pro-apoptotitic payload. In some embodiments, the IL-2 antagonist comprises the following amino acid substitutions L18R, Q22E, Q126T, and S130R as compared to the wild-type IL-2 of SEQ ID NO:2. In some embodiments, the IL-2 antagonist comprises the following amino acid substitutions L18R, Q22E, L80F, R81D, L85V, I86V, and Q126T as compared to the wild-type IL-2 of SEQ ID NO:2. In some embodiments, the IL-2 antagonist comprises the following amino acid substitutions L18R, Q22E, L80F, R81D, L85V, I86V, Q126T, and S130R as compared to the wild-type IL-2 of SEQ ID NO:2. Exemplary antagonists that can be fuses with pro-apoptotic payloads, such as those provided above, are provided below in Table 4.

TABLE 4
IL-2 Antagonsits for Fusion with Pro-Apoptotic Payloads

| SEQ ID NO: | |
|---|---|
| (Information) | Amino acid sequence |
| SEQ ID NO: 36 | APTSSSTKKTQLQLEHLRLDLEMILNGINNYKNPKLTRMLTFKFYM |
| IL-2 antagonist | PKKATELKHLQCLEEELKPLEEVLNLAQSKNFHFDPR |
| | DVVSNINVFV LELKGSETTF MCEYADETATIVEFLNRWIT |
| | FCTSIISTLT |
| SEQ ID NO: 37 | APTSSSTKKTQLQLEHLRLDLEMILNGINNYKNPKLTRMLTFKFYM |
| IL-2 VARIANT (antagonist) | PKKATELKHLQCLEEELKPLEEVLNLAQSKNFHFDPRDVVSNINVF |
| | VLELKGSETTFMCEYADETATIVEFLNRWITFCTSIIRTLT |
| SEQ ID NO: 56 | H9RET-Fc |
| IL-2 extended half-life fusion | APTSSSTKKTQLQLEHLRLDLEMILNGINNYKNPKLTRMLTFKFYM |
| (GS linker can be | PKKATELKHLQCLEEELKPLEEVLNLAQSKNFHFDPRDVVSNINVF |
| GGGGSGGGGSGGGGS as shown | VLELKGSETTFMCEYADETATIVEFLNRWITFCTSIISTLTGGGGS |
| or anything other GS containingin | GGGGSGGGGSDKTHTCPPCPAPELLGGPSVFLFPPKPKDTLMISRT |
| linker) | PEVTCVVVDVSHEDPEVKFNWYVDGVEVHNAKTKPREEQYASTYRV |
| | VSVLTVLHQDWLNGKEYKCKVSNKALPAPIEKTISKAKGQPREPQV |
| | YTLPPSREEMTKNQVSLTCLVKGFYPSDIAVEWESNGQPENNYKTT |
| | PPVLDSDGSFFLYSKLTVDKSRWQQGNVFSCSVMHEALHNHYTQKS |
| | LSLSPGK* |
| SEQ ID NO: 57 | IL-2 VARIANT-Fc |
| IL-2 extended half-life fusion | APTSSSTKKTQLQLEHLRLDLEMILNGINNYKNPKLTRMLTFKFYM |
| (GS linker can be | PKKATELKHLQCLEEELKPLEEVLNLAQSKNFHFDPRDVVSNINVF |
| GGGGSGGGGSGGGGS as shown | VLELKGSETTFMCEYADETATIVEFLNRWITFCTSIIRTLTGGGGS |
| or anything other GS containingin | GGGGSGGGGSDKTHTCPPCPAPELLGGPSVFLFPPKPKDTLMISRT |
| linker) | PEVTCVVVDVSHEDPEVKFNWYVDGVEVHNAKTKPREEQYASTYRV |
| | VSVLTVLHQDWLNGKEYKCKVSNKALPAPIEKTISKAKGQPREPQV |
| | YTLPPSREEMTKNQVSLTCLVKGFYPSDIAVEWESNGQPENNYKTT |
| | PPVLDSDGSFFLYSKLTVDKSRWQQGNVFSCSVMHEALHNHYTQKS |
| | LSLSPGK* |
| SEQ ID NO: 58 | H9RETFYAA-Fc |
| IL-2 extended half-life fusion | APTSSSTKKTQLQLEHLRLDLEMILNGINNYKNPKLTRMLTAKFAM |
| (GS linker can be | PKKATELKHLQCLEEELKPLEEVLNLAQSKNFHFDPRDVVSNINVF |
| GGGGSGGGGSGGGGS as shown | VLELKGSETTFMCEYADETATIVEFLNRWITFCTSIISTLTGGGGS |
| or anything other GS containingin | GGGGSGGGGSDKTHTCPPCPAPELLGGPSVFLFPPKPKDTLMISRT |
| linker) | PEVTCVVVDVSHEDPEVKFNWYVDGVEVHNAKTKPREEQYASTYRV |
| | VSVLTVLHQDWLNGKEYKCKVSNKALPAPIEKTISKAKGQPREPQV |
| | YTLPPSREEMTKNQVSLTCLVKGFYPSDIAVEWESNGQPENNYKTT |
| | PPVLDSDGSFFLYSKLTVDKSRWQQGNVFSCSVMHEALHNHYTQKS |
| | LSLSPGK* |
| SEQ ID NO: 59 | IL-2 VARIANTFYAA-Fc |
| IL-2 extended half-life fusion | APTSSSTKKTQLQLEHLRLDLEMILNGINNYKNPKLTRMLTAKFAM |
| (GS linker can be | PKKATELKHLQCLEEELKPLEEVLNLAQSKNFHFDPRDVVSNINVF |
| GGGGSGGGGSGGGGS as shown | VLELKGSETTFMCEYADETATIVEFLNRWITFCTSIIRTLTGGGGS |
| or any other GS containing linker) | GGGGSGGGGSDKTHTCPPCPAPELLGGPSVFLFPPKPKDTLMISRT |
| | PEVTCVVVDVSHEDPEVKFNWYVDGVEVHNAKTKPREEQYASTYRV |
| | VSVLTVLHQDWLNGKEYKCKVSNKALPAPIEKTISKAKGQPREPQV |
| | YTLPPSREEMTKNQVSLTCLVKGFYPSDIAVEWESNGQPENNYKTT |
| | PPVLDSDGSFFLYSKLTVDKSRWQQGNVFSCSVMHEALHNHYTQKS |
| | LSLSPGK* |
| SEQ ID NO: 60 | H9RETFEAA-Fc |
| IL-2 extended half-life fusion | PKKATELKHLQCLEEALKPLEEVLNLAQSKNFHFDPRDVVSNINVF |
| (GS linker can be | VLELKGSETTFMCEYADETATIVEFLNRWITFCTSIISTLTGGGGS |
| GGGGSGGGGSGGGGS as shown | GGGGSGGGGSDKTHTCPPCPAPELLGGPSVFLFPPKPKDTLMISRT |
| or anyt other GS containing linker) | PEVTCVVVDVSHEDPEVKFNWYVDGVEVHNAKTKPREEQYASTYRV |
| | APTSSSTKKTQLQLEHLRLDLEMILNGINNYKNPKLTRMLTAKFYM |
| | VSVLTVLHQDWLNGKEYKCKVSNKALPAPIEKTISKAKGQPREPQV |
| | YTLPPSREEMTKNQVSLTCLVKGFYPSDIAVEWESNGQPENNYKTT |
| | PPVLDSDGSFFLYSKLTVDKSRWQQGNVFSCSVMHEALHNHYTQKS |
| | LSLSPGK* |
| SEQ ID NO: 61 | IL-2 VARIANTFEAA-Fc |
| IL-2 extended half-life fusion | APTSSSTKKTQLQLEHLRLDLEMILNGINNYKNPKLTRMLTAKFYM |
| (GS linker can be | PKKATELKHLQCLEEALKPLEEVLNLAQSKNFHFDPRDVVSNINVF |
| GGGGSGGGGSGGGGS as shown | VLELKGSETTFMCEYADETATIVEFLNRWITFCTSIIRTLTGGGGS |
| or any other GS containing linker) | GGGGSGGGGSDKTHTCPPCPAPELLGGPSVFLFPPKPKDTLMISRT |
| | PEVTCVVVDVSHEDPEVKFNWYVDGVEVHNAKTKPREEQYASTYRV |
| | VSVLTVLHQDWLNGKEYKCKVSNKALPAPIEKTISKAKGQPREPQV |
| | YTLPPSREEMTKNQVSLTCLVKGFYPSDIAVEWESNGQPENNYKTT |
| | PPVLDSDGSFFLYSKLTVDKSRWQQGNVFSCSVMHEALHNHYTQKS |
| | LSLSPGK* |

[0201] Other fusions can include fusions with anti-apoptotic payloads for use in prolonging activation of CD8 cells, NK cells and anergic NK cells as well, and such exemplary sequences are provided in the table below. Such prolong activation of T-cells can prove beneficial in cancer therapy treatment methods.

TABLE 5
List of Exemplary IL-2 Anti-Apoptotic Fusion Amino Acid Sequences

| SEQ ID NO: | |
|---|---|
| (Information) | Amino acid sequence |
| SEQ ID NO: 40 | H9-BclxL |
| | APTSSSTKKTQLQLEHLLLDLQMILNGINNYKNPKLTRMLTFKFY |
| | MPKKATELKHLQCLEEELKPLEEVLNLAQSKNFHFDPRDVVSNIN |
| | VFVLELKGSETTFMCEYADETATIVEFLNRWITFCQSIISTLTGG |
| | GGSMSQSNRELVVDFLSYKLSQKGYSWSQFSDVEENRTEAPEGTE |
| | SEMETPSAINGNPSWHLADSPAVNGATGHSSSLDAREVIPMAAVK |
| | QALREAGDEFELRYRRAFSDLTSQLHITPGTAYQSFEQVVNELFR |
| | DGVNWGRIVAFFSFGGALCVESVDKEMQVLVSRIAAWMATYLNDH |
| | LEPWIQENGGWDTFVELYGNNAAAESRKGQERFNRWFLTGMTVAG |
| | VVLLGSLFSRK* |
| SEQ ID NO: 41 | H9FYAA-BclxL |
| | APTSSSTKKTQLQLEHLLLDLQMILNGINNYKNPKLTRMLTAKFA |
| | MPKKATELKHLQCLEEELKPLEEVLNLAQSKNFHFDPRDVVSNIN |
| | VFVLELKGSETTFMCEYADETATIVEFLNRWITFCQSIISTLTGG |
| | GGSMSQSNRELVVDFLSYKLSQKGYSWSQFSDVEENRTEAPEGTE |
| | SEMETPSAINGNPSWHLADSPAVNGATGHSSSLDAREVIPMAAVK |
| | QALREAGDEFELRYRRAFSDLTSQLHITPGTAYQSFEQVVNELFR |
| | DGVNWGRIVAFFSFGGALCVESVDKEMQVLVSRIAAWMATYLNDH |
| | LEPWIQENGGWDTFVELYGNNAAAESRKGQERFNRWFLTGMTVAG |
| | VVLLGSLFSRK* |
| SEQ ID NO: 42 | H9FEAA-BclxL |
| | APTSSSTKKTQLQLEHLLLDLQMILNGINNYKNPKLTRMLTAKFY |
| | MPKKATELKHLQCLEEALKPLEEVLNLAQSKNFHFDPRDVVSNIN |
| | VFVLELKGSETTFMCEYADETATIVEFLNRWITFCQSIISTLTGG |
| | GGSMSQSNRELVVDFLSYKLSQKGYSWSQFSDVEENRTEAPEGTE |
| | SEMETPSAINGNPSWHLADSPAVNGATGHSSSLDAREVIPMAAVK |
| | QALREAGDEFELRYRRAFSDLTSQLHITPGTAYQSFEQVVNELFR |
| | DGVNWGRIVAFFSFGGALCVESVDKEMQVLVSRIAAWMATYLNDH |
| | LEPWIQENGGWDTFVELYGNNAAAESRKGQERFNRWFLTGMTVAG |
| | VVLLGSLFSRK* |
| SEQ ID NO: 43 | H9D10-BclxL |
| | APTSSSTKKTQLQLEHLLLDLQMILNGINNYKNPKLTRMLTFKFY |
| | MPKKATELKHLQCLEEELKPLEEVLNLAHSKNFHFDPRDVVSNIN |
| | VFVLELKGSETTFMCEYADETATIVEFLNRWITFCQSIISTLTGG |
| | GGSMSQSNRELVVDFLSYKLSQKGYSWSQFSDVEENRTEAPEGTE |
| | SEMETPSAINGNPSWHLADSPAVNGATGHSSSLDAREVIPMAAVK |
| | QALREAGDEFELRYRRAFSDLTSQLHITPGTAYQSFEQVVNELFR |
| | DGVNWGRIVAFFSFGGALCVESVDKEMQVLVSRIAAWMATYLNDH |
| | LEPWIQENGGWDTFVELYGNNAAAESRKGQERFNRWFLTGMTVAG |
| | VVLLGSLFSRK* |
| SEQ ID NO: 44 | H9E10-BclxL |
| | APTSSSTKKTQLQLEHLLLDLQMILNGINNYKNPKLTRMLTFKFY |
| | MPKKATELKHLQCLEEELKPLEEVLNLASSKNFHFDPRDVVSNIN |
| | VFVLELKGSETTFMCEYADETATIVEFLNRWITFCQSIISTLTGG |
| | GGSMSQSNRELVVDFLSYKLSQKGYSWSQFSDVEENRTEAPEGTE |
| | SEMETPSAINGNPSWHLADSPAVNGATGHSSSLDAREVIPMAAVK |
| | QALREAGDEFELRYRRAFSDLTSQLHITPGTAYQSFEQVVNELFR |
| | DGVNWGRIVAFFSFGGALCVESVDKEMQVLVSRIAAWMATYLNDH |
| | LEPWIQENGGWDTFVELYGNNAAAESRKGQERFNRWFLTGMTVAG |
| | VVLLGSLFSRK* |
| SEQ ID NO: 45 | H9G8-Bclx1 |
| | APTSSSTKKTQLQLEHLLLDLQMILNGINNYKNPKLTRMLTFKFY |
| | MPKKATELKHLQCLEEELKPLEEVLNLANSKNFHFDPRDVVSNIN |
| | VFVLELKGSETTFMCEYADETATIVEFLNRWITFCQSIISTLTGG |
| | GGSMSQSNRELVVDFLSYKLSQKGYSWSQFSDVEENRTEAPEGTE |
| | SEMETPSAINGNPSWHLADSPAVNGATGHSSSLDAREVIPMAAVK |
| | QALREAGDEFELRYRRAFSDLTSQLHITPGTAYQSFEQVVNELFR |
| | DGVNWGRIVAFFSFGGALCVESVDKEMQVLVSRIAAWMATYLNDH |
| | LEPWIQENGGWDTFVELYGNNAAAESRKGQERFNRWFLTGMTVAG |
| | VVLLGSLFSRK* |
| SEQ ID NO: 46 | H9B1-BclxL |
| | APTSSSTKKTQLQLEHLLLDLQMILNGINNYKNPKLTRMLTFKFY |
| | MPKKATELKHLQCLEEELKPLEEVLNLANSKNFHFDPRDVVSNVN |
| | VFVLELKGSETTFMCEYADETATIVEFLNRWITFCQSIISTLTGG |
| | GGSMSQSNRELVVDFLSYKLSQKGYSWSQFSDVEENRTEAPEGTE |
| | SEMETPSAINGNPSWHLADSPAVNGATGHSSSLDAREVIPMAAVK |
| | QALREAGDEFELRYRRAFSDLTSQLHITPGTAYQSFEQVVNELFR |
| | DGVNWGRIVAFFSFGGALCVESVDKEMQVLVSRIAAWMATYLNDH |
| | LEPWIQENGGWDTFVELYGNNAAAESRKGQERFNRWFLTGMTVAG |
| | VVLLGSLFSRK* |

[0202] Other exemplary IL-2 fusions include those listed in the table below:

TABLE 6
List of Exemplary IL-2 Extended Half-Life Fusion Amino Acid Sequences

| SEQ ID NO: | |
|---|---|
| (Information) | Amino acid sequence |
| SEQ ID NO: 47 | H9-Fc (H9 at N-terminal only shown) |
| IL-2 extended half-life | APTSSSTKKTQLQLEHLLLDLQMILNGINNYKNPKLTRMLTFKFY |
| fusion | MPKKATELKHLQCLEEELKPLEEVLNLAQSKNFHFDPRDVVSNIN |
| | VFVLELKGSETTFMCEYADETATIVEFLNRWITFCQSIISTLTGG |
| | GGSGGGGSGGGGSDKTHTCPPCPAPELLGGPSVFLFPPKPKDTLM |
| | ISRTPEVTCVVVDVSHEDPEVKFNWYVDGVEVHNAKTKPREEQYA |
| | STYRVVSVLTVLHQDWLNGKEYKCKVSNKALPAPIEKTISKAKGQ |
| | PREPQVYTLPPSREEMTKNQVSLTCLVKGFYPSDIAVEWESNGQP |
| | ENNYKTTPPVLDSDGSFFLYSKLTVDKSRWQQGNVFSCSVMHEAL |
| | HNHYTQKSLSLSPGK* |
| SEQ ID NO: 48 | H9-Fc (″Knob-in-hole″ with H9 at N-terminus) |
| IL-2 extended half-life | APTSSSTKKTQLQLEHLLLDLQMILNGINNYKNPKLTRMLTFKFY |
| fusion | MPKKATELKHLQCLEEELKPLEEVLNLAQSKNFHFDPRDVVSNIN |
| | VFVLELKGSETTFMCEYADETATIVEFLNRWITFCQSIISTLTGG |
| | GGSGGGGSGGGGSDKTHTCPPCPAPELLGGPSVFLFPPKPKDTLM |
| | ISRTPEVTCVVVDVSHEDPEVKFNWYVDGVEVHNAKTKPREEQYA |
| | STYRVVSVLTVLHQDWLNGKEYKCKVSNKALPAPIEKTISKAKGQ |
| | PREPQVYTLPPSREEMTKNQVSLTCLVKGFYPSDIAVEWESNGQP |
| | ENNYKTTPPVLDSDGSFFLYSKLTVDKSRWQQGNVFSCSVMHEAL |
| | HNHYTQKSLSLSPGK-[FC sequence] |
| SEQ ID NO: 49 | H9-Fc (″Knob-in-hole″ with H9 at C-terminus) |
| IL-2 extended half-life | [FC sequence]- |
| fusion | APTSSSTKKTQLQLEHLLLDLQMILNGINNYKNPKLTRMLTFKFY |
| | MPKKATELKHLQCLEEELKPLEEVLNLAQSKNFHFDPRDVVSNIN |
| | VFVLELKGSETTFMCEYADETATIVEFLNRWITFCQSIISTLTGG |
| | GGSGGGGSGGGGSDKTHTCPPCPAPELLGGPSVFLFPPKPKDTLM |
| | ISRTPEVTCVVVDVSHEDPEVKFNWYVDGVEVHNAKTKPREEQYA |
| | STYRVVSVLTVLHQDWLNGKEYKCKVSNKALPAPIEKTISKAKGQ |
| | PREPQVYTLPPSREEMTKNQVSLTCLVKGFYPSDIAVEWESNGQP |
| | ENNYKTTPPVLDSDGSFFLYSKLTVDKSRWQQGNVFSCSVMHEAL |
| | HNHYTQKSLSLSPGK* |
| SEQ ID NO: 50 | H9FYAA-Fc |
| IL-2 extended half-life | APTSSSTKKTQLQLEHLLLDLQMILNGINNYKNPKLTRMLTAKFA |
| fusion | MPKKATELKHLQCLEEELKPLEEVLNLAQSKNFHFDPRDVVSNIN |
| | VFVLELKGSETTFMCEYADETATIVEFLNRWITFCQSIISTLTGG |
| | GGSGGGGSGGGGSDKTHTCPPCPAPELLGGPSVFLFPPKPKDTLM |
| | ISRTPEVTCVVVDVSHEDPEVKFNWYVDGVEVHNAKTKPREEQYA |
| | STYRVVSVLTVLHQDWLNGKEYKCKVSNKALPAPIEKTISKAKGQ |
| | PREPQVYTLPPSREEMTKNQVSLTCLVKGFYPSDIAVEWESNGQP |
| | ENNYKTTPPVLDSDGSFFLYSKLTVDKSRWQQGNVFSCSVMHEAL |
| | HNHYTQKSLSLSPGK* |
| SEQ ID NO: 51 | H9FEAA-Fc |
| IL-2 extended half-life | APTSSSTKKTQLQLEHLLLDLQMILNGINNYKNPKLTRMLTAKFY |
| fusion | MPKKATELKHLQCLEEALKPLEEVLNLAQSKNFHFDPRDVVSNIN |
| (GS linker can be | VFVLELKGSETTFMCEYADETATIVEFLNRWITFCQSIISTLTGG |
| GGGGSGGGGSGGGGS as shown | GGSGGGGSGGGGSDKTHTCPPCPAPELLGGPSVFLFPPKPKDTLM |
| or any other GS | ISRTPEVTCVVVDVSHEDPEVKFNWYVDGVEVHNAKTKPREEQYA |
| containing linker) | STYRVVSVLTVLHQDWLNGKEYKCKVSNKALPAPIEKTISKAKGQ |
| | PREPQVYTLPPSREEMTKNQVSLTCLVKGFYPSDIAVEWESNGQP |
| | ENNYKTTPPVLDSDGSFFLYSKLTVDKSRWQQGNVFSCSVMHEAL |
| | HNHYTQKSLSLSPGK* |
| SEQ ID NO: 52 | H9D10-Fc |
| IL-2 extended half-life | APTSSSTKKTQLQLEHLLLDLQMILNGINNYKNPKLTRMLTFKFY |
| fusion | MPKKATELKHLQCLEEELKPLEEVLNLAHSKNFHFDPRDVVSNIN |
| (GS linker can be | VFVLELKGSETTFMCEYADETATIVEFLNRWITFCQSIISTLTGG |
| GGGGSGGGGSGGGGS as shown | GGSGGGGSGGGGSDKTHTCPPCPAPELLGGPSVFLFPPKPKDTLM |
| or any other GS | ISRTPEVTCVVVDVSHEDPEVKFNWYVDGVEVHNAKTKPREEQYA |
| containing linker) | STYRVVSVLTVLHQDWLNGKEYKCKVSNKALPAPIEKTISKAKGQ |
| | PREPQVYTLPPSREEMTKNQVSLTCLVKGFYPSDIAVEWESNGQP |
| | ENNYKTTPPVLDSDGSFFLYSKLTVDKSRWQQGNVFSCSVMHEAL |
| | HNHYTQKSLSLSPGK* |
| SEQ ID NO: 53 | H9E10-Fc |
| IL-2 extended half-life | APTSSSTKKTQLQLEHLLLDLQMILNGINNYKNPKLTRMLTFKFY |
| fusion | MPKKATELKHLQCLEEELKPLEEVLNLASSKNFHFDPRDVVSNIN |
| (GS linker can be | VFVLELKGSETTFMCEYADETATIVEFLNRWITFCQSIISTLTGG |
| GGGGSGGGGSGGGGS as shown | GGSGGGGSGGGGSDKTHTCPPCPAPELLGGPSVFLFPPKPKDTLM |
| or any other GS | ISRTPEVTCVVVDVSHEDPEVKFNWYVDGVEVHNAKTKPREEQYA |
| containing linker) | STYRVVSVLTVLHQDWLNGKEYKCKVSNKALPAPIEKTISKAKGQ |
| | PREPQVYTLPPSREEMTKNQVSLTCLVKGFYPSDIAVEWESNGQP |
| | ENNYKTTPPVLDSDGSFFLYSKLTVDKSRWQQGNVFSCSVMHEAL |
| | HNHYTQKSLSLSPGK* |
| SEQ ID NO: 54 | H9G8-Fc |
| IL-2 extended half-life | APTSSSTKKTQLQLEHLLLDLQMILNGINNYKNPKLTRMLTFKFY |
| fusion | MPKKATELKHLQCLEEELKPLEEVLNLANSKNFHFDPRDVVSNIN |
| (GS linker can be | VFVLELKGSETTFMCEYADETATIVEFLNRWITFCQSIISTLTGG |
| GGGGSGGGGSGGGGS as shown | GGSGGGGSGGGGSDKTHTCPPCPAPELLGGPSVFLFPPKPKDTLM |
| or any other GS | ISRTPEVTCVVVDVSHEDPEVKFNWYVDGVEVHNAKTKPREEQYA |
| containing linker) | STYRVVSVLTVLHQDWLNGKEYKCKVSNKALPAPIEKTISKAKGQ |
| | PREPQVYTLPPSREEMTKNQVSLTCLVKGFYPSDIAVEWESNGQP |
| | ENNYKTTPPVLDSDGSFFLYSKLTVDKSRWQQGNVFSCSVMHEAL |
| | HNHYTQKSLSLSPGK* |
| SEQ ID NO: 55 | H9B1- Fc |
| IL-2 extended half-life | APTSSSTKKTQLQLEHLLLDLQMILNGINNYKNPKLTRMLTFKFY |
| fusion | MPKKATELKHLQCLEEELKPLEEVLNLANSKNFHFDPRDVVSNVN |
| (GS linker can be | VFVLELKGSETTFMCEYADETATIVEFLNRWITFCQSIISTLTGG |
| GGGGSGGGGSGGGGS as shown | GGSGGGGSGGGGSDKTHTCPPCPAPELLGGPSVFLFPPKPKDTLM |
| or any other GS | ISRTPEVTCVVVDVSHEDPEVKFNWYVDGVEVHNAKTKPREEQYA |
| containing linker) | STYRVVSVLTVLHQDWLNGKEYKCKVSNKALPAPIEKTISKAKGQ |
| | PREPQVYTLPPSREEMTKNQVSLTCLVKGFYPSDIAVEWESNGQP |
| | ENNYKTTPPVLDSDGSFFLYSKLTVDKSRWQQGNVFSCSVMHEAL |
| | HNHYTQKSLSLSPGK* |
| SEQ ID NO: 62 | H9-Albumin (H9 at C-terminal shown) |
| (GS linker can be | DAHKSEVAHRFKDLGEENFKALVLIAFAQYLQQCPFEDHVKLVNEVTEFA |
| GGGGSGGGGSGGGGS as shown | KTCVADESAENCDKSLHTLFGDKLCTVATLRETYGEMADCCAKQEPERNE |
| or any other GS | CFLQHKDDNPNLPRLVRPEVDVMCTAFHDNEETFLKKYLYEIARRHPYFY |
| containing linker) | APELLFFAKRYKAAFTECCQAADKAACLLPKLDELRDEGKASSAKQRLKC |
| | ASLQKFGERAFKAWAVARLSQRFPKAEFAEVSKLVTDLTKVHTECCHGDL |
| | LECADDRADLAKYICENQDSISSKLKECCEKPLLEKSHCIAEVENDEMPA |
| | DLPSLAADFVESKDVCKNYAEAKDVFLGMFLYEYARRHPDYSVVLLLRLA |
| | KTYETTLEKCCAAADPHECYAKVFDEFKPLVEEPQNLIKQNCELFEQLGE |
| | YKFQNALLVRYTKKVPQVSTPTLVEVSRNLGKVGSKCCKHPEAKRMPCAE |
| | DYLSVVLNQLCVLHEKTPVSDRVTKCCTESLVNRRPCFSALEVDETYVPK |
| | EFNAETFTFHADICTLSEKERQIKKQTALVELVKHKPKATKEQLKAVMDD |
| | FAAFVEKCCKADDKETCFAEEGKKLVAASQAALGLGGGGSGGGGSGGGG |
| | SAPTSSSTKKTQLQLEHLLLDLQMILNGINNYKNPKLTRMLTFKF |
| | YMPKKATELKHLQCLEEELKPLEEVLNLAQSKNFHFDPRDVVSNI |
| | NVFVLELKGSETTFMCEYADETATIVEFLNRWITFCQSIISTLT* |
| SEQ ID NO: 63 | H9FYAA-Albumin (H9FYAA at C-terminal shown) |
| (GS linker can be | DAHKSEVAHRFKDLGEENFKALVLIAFAQYLQQCPFEDHVKLVNEVTEFA |
| GGGGSGGGGSGGGGS as shown | KTCVADESAENCDKSLHTLFGDKLCTVATLRETYGEMADCCAKQEPERNE |
| or any other GS | CFLQHKDDNPNLPRLVRPEVDVMCTAFHDNEETFLKKYLYEIARRHPYFY |
| containing linker) | APELLFFAKRYKAAFTECCQAADKAACLLPKLDELRDEGKASSAKQRLKC |
| | ASLQKFGERAFKAWAVARLSQRFPKAEFAEVSKLVTDLTKVHTECCHGDL |
| | LECADDRADLAKYICENQDSISSKLKECCEKPLLEKSHCIAEVENDEMPA |
| | DLPSLAADFVESKDVCKNYAEAKDVFLGMFLYEYARRHPDYSVVLLLRLA |
| | KTYETTLEKCCAAADPHECYAKVFDEFKPLVEEPQNLIKQNCELFEQLGE |
| | YKFQNALLVRYTKKVPQVSTPTLVEVSRNLGKVGSKCCKHPEAKRMPCAE |
| | DYLSVVLNQLCVLHEKTPVSDRVTKCCTESLVNRRPCFSALEVDETYVPK |
| | EFNAETFTFHADICTLSEKERQIKKQTALVELVKHKPKATKEQLKAVMDD |
| | FAAFVEKCCKADDKETCFAEEGKKLVAASQAALGLGGGGSGGGGSGGGG |
| | SAPTSSSTKKTQLQLEHLLLDLQMILNGINNYKNPKLTRMLTAKFAMPKK |
| | ATELKHLQCLEEELKPLEEVLNLAQSKNFHFDPRDVVSNINVFVLELKGS |
| | ETTFMCEYADETATIVEFLNRWITFCQSIISTLT |
| SEQ ID NO: 64 | H9FEAA-Albumin (H9FEAA at C-terminal shown) |
| (GS linker can be | DAHKSEVAHRFKDLGEENFKALVLIAFAQYLQQCPFEDHVKLVNEVTEFA |
| GGGGSGGGGSGGGGS as shown | KTCVADESAENCDKSLHTLFGDKLCTVATLRETYGEMADCCAKQEPERNE |
| or any other GS | CFLQHKDDNPNLPRLVRPEVDVMCTAFHDNEETFLKKYLYEIARRHPYFY |
| containing linker) | APELLFFAKRYKAAFTECCQAADKAACLLPKLDELRDEGKASSAKQRLKC |
| | ASLQKFGERAFKAWAVARLSQRFPKAEFAEVSKLVTDLTKVHTECCHGDL |
| | LECADDRADLAKYICENQDSISSKLKECCEKPLLEKSHCIAEVENDEMPA |
| | DLPSLAADFVESKDVCKNYAEAKDVFLGMFLYEYARRHPDYSVVLLLRLA |
| | KTYETTLEKCCAAADPHECYAKVFDEFKPLVEEPQNLIKQNCELFEQLGE |
| | YKFQNALLVRYTKKVPQVSTPTLVEVSRNLGKVGSKCCKHPEAKRMPCAE |
| | DYLSVVLNQLCVLHEKTPVSDRVTKCCTESLVNRRPCFSALEVDETYVPK |
| | EFNAETFTFHADICTLSEKERQIKKQTALVELVKHKPKATKEQLKAVMDD |
| | FAAFVEKCCKADDKETCFAEEGKKLVAASQAALGLGGGGSGGGGSGGGG |
| | SAPTSSSTKKTQLQLEHLLLDLQMILNGINNYKNPKLTRMLTAKFYMPKK |
| | ATELKHLQCLEEALKPLEEVLNLAQSKNFHFDPRDVVSNINVFVLELKGS |
| | ETTFMCEYADETATIVEFLNRWITFCQSIISTLT |
| SEQ ID NO: 65 | H9D10-Albumin (H9D10 shown at N-terminal) |
| (GS linker can be | APTSSSTKKTQLQLEHLLLDLQMILNGINNYKNPKLTRMLTFKFYMPKKA |
| GGGGSGGGGSGGGGS as shown | TELKHLQCLEEELKPLEEVLNLAHSKNFHFDPRDVVSNINVFVLELKGSE |
| or any other GS | TTFMCEYADETATIVEFLNRWITFCQSIISTLTGGGGSGGGGSGGGGSD |
| containing linker) | AHKSEVAHRFKDLGEENFKALVLIAFAQYLQQCPFEDHVKLVNEVTEFAK |
| | TCVADESAENCDKSLHTLFGDKLCTVATLRETYGEMADCCAKQEPERNEC |
| | FLQHKDDNPNLPRLVRPEVDVMCTAFHDNEETFLKKYLYEIARRHPYFYA |
| | PELLFFAKRYKAAFTECCQAADKAACLLPKLDELRDEGKASSAKQRLKCA |
| | SLQKFGERAFKAWAVARLSQRFPKAEFAEVSKLVTDLTKVHTECCHGDLL |
| | ECADDRADLAKYICENQDSISSKLKECCEKPLLEKSHCIAEVENDEMPAD |
| | LPSLAADFVESKDVCKNYAEAKDVFLGMFLYEYARRHPDYSVVLLLRLAK |
| | TYETTLEKCCAAADPHECYAKVFDEFKPLVEEPQNLIKQNCELFEQLGEY |
| | KFQNALLVRYTKKVPQVSTPTLVEVSRNLGKVGSKCCKHPEAKRMPCAED |
| | YLSVVLNQLCVLHEKTPVSDRVTKCCTESLVNRRPCFSALEVDETYVPKE |
| | FNAETFTFHADICTLSEKERQIKKQTALVELVKHKPKATKEQLKAVMDDF |
| | AAFVEKCCKADDKETCFAEEGKKLVAASQAALGL |
| SEQ ID NO: 66 | H9D10FEAA-Albumin |
| GGGGSGGGGSGGGGS as shown | APTSSSTKKTQLQLEHLLLDLQMILNGINNYKNPKLTRMLTAKFYMPKKA |
| or any other GS | TELKHLQCLEEALKPLEEVLNLAHSKNFHFDPRDVVSNINVFVLELKGSE |
| containing linker) | TTFMCEYADETATIVEFLNRWITFCQSIISTLTGGGGSGGGGSGGGGSD |
| (GS linker can be | AHKSEVAHRFKDLGEENFKALVLIAFAQYLQQCPFEDHVKLVNEVTEFAK |
| | TCVADESAENCDKSLHTLFGDKLCTVATLRETYGEMADCCAKQEPERNEC |
| | FLQHKDDNPNLPRLVRPEVDVMCTAFHDNEETFLKKYLYEIARRHPYFYA |
| | PELLFFAKRYKAAFTECCQAADKAACLLPKLDELRDEGKASSAKQRLKCA |
| | SLQKFGERAFKAWAVARLSQRFPKAEFAEVSKLVTDLTKVHTECCHGDLL |
| | ECADDRADLAKYICENQDSISSKLKECCEKPLLEKSHCIAEVENDEMPAD |
| | LPSLAADFVESKDVCKNYAEAKDVFLGMFLYEYARRHPDYSVVLLLRLAK |
| | TYETTLEKCCAAADPHECYAKVFDEFKPLVEEPQNLIKQNCELFEQLGEY |
| | KFQNALLVRYTKKVPQVSTPTLVEVSRNLGKVGSKCCKHPEAKRMPCAED |
| | YLSVVLNQLCVLHEKTPVSDRVTKCCTESLVNRRPCFSALEVDETYVPKE |
| | FNAETFTFHADICTLSEKERQIKKQTALVELVKHKPKATKEQLKAVMDDF |
| | AAFVEKCCKADDKETCFAEEGKKLVAASQAALGL |
| SEQ ID NO: 67 | H9E10-Albumin (H9E10 shown at N-terminal) |
| (GS linker can be | APTSSSTKKTQLQLEHLLLDLQMILNGINNYKNPKLTRMLTFKFYMPKKA |
| GGGGSGGGGSGGGGS as shown | TELKHLQCLEEELKPLEEVLNLASSKNFHFDPRDVVSNINVFVLELKGSE |
| or anything other GS | TTFMCEYADETATIVEFLNRWITFCQSIISTLTGGGGSGGGGSGGGGSD |
| containingin linker) | AHKSEVAHRFKDLGEENFKALVLIAFAQYLQQCPFEDHVKLVNEVTEFAK |
| | TCVADESAENCDKSLHTLFGDKLCTVATLRETYGEMADCCAKQEPERNEC |
| | FLQHKDDNPNLPRLVRPEVDVMCTAFHDNEETFLKKYLYEIARRHPYFYA |
| | PELLFFAKRYKAAFTECCQAADKAACLLPKLDELRDEGKASSAKQRLKCA |
| | SLQKFGERAFKAWAVARLSQRFPKAEFAEVSKLVTDLTKVHTECCHGDLL |
| | ECADDRADLAKYICENQDSISSKLKECCEKPLLEKSHCIAEVENDEMPAD |
| | LPSLAADFVESKDVCKNYAEAKDVFLGMFLYEYARRHPDYSVVLLLRLAK |
| | TYETTLEKCCAAADPHECYAKVFDEFKPLVEEPQNLIKQNCELFEQLGEY |
| | KFQNALLVRYTKKVPQVSTPTLVEVSRNLGKVGSKCCKHPEAKRMPCAED |
| | YLSVVLNQLCVLHEKTPVSDRVTKCCTESLVNRRPCFSALEVDETYVPKE |
| | FNAETFTFHADICTLSEKERQIKKQTALVELVKHKPKATKEQLKAVMDDF |
| | AAFVEKCCKADDKETCFAEEGKKLVAASQAALGL |
| SEQ ID NO: 68 | H9G8-Albumin (H9G8 shown at N-terminal) |
| (GS linker can be | APTSSSTKKTQLQLEHLLLDLQMILNGINNYKNPKLTRMLTFKFYMPKKA |
| GGGGSGGGGSGGGGS as shown | TELKHLQCLEEELKPLEEVLNLANSKNFHFDPRDVVSNINVFVLELKGSE |
| or anything other GS | TTFMCEYADETATIVEFLNRWITFCQSIISTLTGGGGSGGGGSGGGGSD |
| containingin linker) | AHKSEVAHRFKDLGEENFKALVLIAFAQYLQQCPFEDHVKLVNEVTEFAK |
| | TCVADESAENCDKSLHTLFGDKLCTVATLRETYGEMADCCAKQEPERNEC |
| | FLQHKDDNPNLPRLVRPEVDVMCTAFHDNEETFLKKYLYEIARRHPYFYA |
| | PELLFFAKRYKAAFTECCQAADKAACLLPKLDELRDEGKASSAKQRLKCA |
| | SLQKFGERAFKAWAVARLSQRFPKAEFAEVSKLVTDLTKVHTECCHGDLL |
| | ECADDRADLAKYICENQDSISSKLKECCEKPLLEKSHCIAEVENDEMPAD |
| | LPSLAADFVESKDVCKNYAEAKDVFLGMFLYEYARRHPDYSVVLLLRLAK |
| | TYETTLEKCCAAADPHECYAKVFDEFKPLVEEPQNLIKQNCELFEQLGEY |
| | KFQNALLVRYTKKVPQVSTPTLVEVSRNLGKVGSKCCKHPEAKRMPCAED |
| | YLSVVLNQLCVLHEKTPVSDRVTKCCTESLVNRRPCFSALEVDETYVPKE |
| | FNAETFTFHADICTLSEKERQIKKQTALVELVKHKPKATKEQLKAVMDDF |
| | AAFVEKCCKADDKETCFAEEGKKLVAASQAALGL |
| SEQ ID NO: 69 | H9B1-Albumin (H9B1 shown at N-terminal) |
| (GS linker can be | APTSSSTKKTQLQLEHLLLDLQMILNGINNYKNPKLTRMLTFKFYMPKKA |
| GGGGSGGGGSGGGGS as shown | TELKHLQCLEEELKPLEEVLNLANSKNFHFDPRDVVSNVNVFVLELKGSE |
| or anything other GS | TTFMCEYADETATIVEFLNRWITFCQSIISTLTGGGGSGGGGSGGGGSDA |
| containingin linker) | HKSEVAHRFKDLGEENFKALVLIAFAQYLQQCPFEDHVKLVNEVTEFAKT |
| | CVADESAENCDKSLHTLFGDKLCTVATLRETYGEMADCCAKQEPERNECF |
| | LQHKDDNPNLPRLVRPEVDVMCTAFHDNEETFLKKYLYEIARRHPYFYAP |
| | ELLFFAKRYKAAFTECCQAADKAACLLPKLDELRDEGKASSAKQRLKCAS |
| | LQKFGERAFKAWAVARLSQRFPKAEFAEVSKLVTDLTKVHTECCHGDLLE |
| | CADDRADLAKYICENQDSISSKLKECCEKPLLEKSHCIAEVENDEMPADL |
| | PSLAADFVESKDVCKNYAEAKDVFLGMFLYEYARRHPDYSVVLLLRLAKT |
| | YETTLEKCCAAADPHECYAKVFDEFKPLVEEPQNLIKQNCELFEQLGEYK |
| | FQNALLVRYTKKVPQVSTPTLVEVSRNLGKVGSKCCKHPEAKRMPCAEDY |
| | LSVVLNQLCVLHEKTPVSDRVTKCCTESLVNRRPCFSALEVDETYVPKEF |
| | NAETFTFHADICTLSEKERQIKKQTALVELVKHKPKATKEQLKAVMDDFA |
| | AFVEKCCKADDKETCFAEEGKKLVAASQAALGL |
| SEQ ID NO: 70 | H9FEAA-Albumin (H9FEAA at N-terminal shown) |
| (GS linker can be | APTSSSTKKTQLQLEHLLLDLQMILNGINNYKNPKLTRMLTAKFYMPKKA |
| GGGGSGGGGSGGGGS as shown | TELKHLQCLEEALKPLEEVLNLAQSKNFHFDPRDVVSNINVFVLELKGSE |
| or any other GS | TTFMCEYADETATIVEFLNRWITFCQSIISTLTGGGGSGGGGSGGGGSD |
| containing linker) | AHKSEVAHRFKDLGEENFKALVLIAFAQYLQQCPFEDHVKLVNEVTEFAK |
| | TCVADESAENCDKSLHTLFGDKLCTVATLRETYGEMADCCAKQEPERNEC |
| | FLQHKDDNPNLPRLVRPEVDVMCTAFHDNEETFLKKYLYEIARRHPYFYA |
| | PELLFFAKRYKAAFTECCQAADKAACLLPKLDELRDEGKASSAKQRLKCA |
| | SLQKFGERAFKAWAVARLSQRFPKAEFAEVSKLVTDLTKVHTECCHGDLL |
| | ECADDRADLAKYICENQDSISSKLKECCEKPLLEKSHCIAEVENDEMPAD |
| | LPSLAADFVESKDVCKNYAEAKDVFLGMFLYEYARRHPDYSVVLLLRLAK |
| | TYETTLEKCCAAADPHECYAKVFDEFKPLVEEPQNLIKQNCELFEQLGEY |
| | KFQNALLVRYTKKVPQVSTPTLVEVSRNLGKVGSKCCKHPEAKRMPCAED |
| | YLSVVLNQLCVLHEKTPVSDRVTKCCTESLVNRRPCFSALEVDETYVPKE |
| | FNAETFTFHADICTLSEKERQIKKQTALVELVKHKPKATKEQLKAVMDDF |
| | AAFVEKCCKADDKETCFAEEGKKLVAASQAALGL |
| SEQ ID NO: 71 | H9D10-Albumin (H9D10 shown at C-terminal) |
| (GS linker can be | DAHKSEVAHRFKDLGEENFKALVLIAFAQYLQQCPFEDHVKLVNEVTEFA |
| GGGGSGGGGSGGGGS as shown | KTCVADESAENCDKSLHTLFGDKLCTVATLRETYGEMADCCAKQEPERNE |
| or any other GS | CFLQHKDDNPNLPRLVRPEVDVMCTAFHDNEETFLKKYLYEIARRHPYFY |
| containing linker) | APELLFFAKRYKAAFTECCQAADKAACLLPKLDELRDEGKASSAKQRLKC |
| | ASLQKFGERAFKAWAVARLSQRFPKAEFAEVSKLVTDLTKVHTECCHGDL |
| | LECADDRADLAKYICENQDSISSKLKECCEKPLLEKSHCIAEVENDEMPA |
| | DLPSLAADFVESKDVCKNYAEAKDVFLGMFLYEYARRHPDYSVVLLLRLA |
| | KTYETTLEKCCAAADPHECYAKVFDEFKPLVEEPQNLIKQNCELFEQLGE |
| | YKFQNALLVRYTKKVPQVSTPTLVEVSRNLGKVGSKCCKHPEAKRMPCAE |
| | DYLSVVLNQLCVLHEKTPVSDRVTKCCTESLVNRRPCFSALEVDETYVPK |
| | EFNAETFTFHADICTLSEKERQIKKQTALVELVKHKPKATKEQLKAVMDD |
| | FAAFVEKCCKADDKETCFAEEGKKLVAASQAALGLGGGGSGGGGSGGGG |
| | SAPTSSSTKKTQLQLEHLLLDLQMILNGINNYKNPKLTRMLTFKFYMPKK |
| | ATELKHLQCLEEELKPLEEVLNLAHSKNFHFDPRDVVSNINVFVLELKGS |
| | ETTFMCEYADETATIVEFLNRWITFCQSIISTLT |
| SEQ ID NO: 72 | H9D10FEAA-Albumin (H9FEAA shown at C- |
| (GS linker can be | terminal) |
| GGGGGGGGSGGGGS as shown | DAHKSEVAHRFKDLGEENFKALVLIAFAQYLQQCPFEDHVKLVNEVTEFA |
| or any other GS | KTCVADESAENCDKSLHTLFGDKLCTVATLRETYGEMADCCAKQEPERNE |
| containing linker) | CFLQHKDDNPNLPRLVRPEVDVMCTAFHDNEETFLKKYLYEIARRHPYFY |
| | APELLFFAKRYKAAFTECCQAADKAACLLPKLDELRDEGKASSAKQRLKC |
| | ASLQKFGERAFKAWAVARLSQRFPKAEFAEVSKLVTDLTKVHTECCHGDL |
| | LECADDRADLAKYICENQDSISSKLKECCEKPLLEKSHCIAEVENDEMPA |
| | DLPSLAADFVESKDVCKNYAEAKDVFLGMFLYEYARRHPDYSVVLLLRLA |
| | KTYETTLEKCCAAADPHECYAKVFDEFKPLVEEPQNLIKQNCELFEQLGE |
| | YKFQNALLVRYTKKVPQVSTPTLVEVSRNLGKVGSKCCKHPEAKRMPCAE |
| | DYLSVVLNQLCVLHEKTPVSDRVTKCCTESLVNRRPCFSALEVDETYVPK |
| | EFNAETFTFHADICTLSEKERQIKKQTALVELVKHKPKATKEQLKAVMDD |
| | FAAFVEKCCKADDKETCFAEEGKKLVAASQAALGLGGGGSGGGGSGGGG |
| | SAPTSSSTKKTQLQLEHLLLDLQMILNGINNYKNPKLTRMLTAKFYMPKK |
| | ATELKHLQCLEEALKPLEEVLNLAHSKNFHFDPRDVVSNINVFVLELKGS |
| | ETTFMCEYADETATIVEFLNRWITFCQSIISTLT |
| SEQ ID NO: 73 | H9E10-Albumin (H9E10 shown at C-terminal) |
| (GS linker can be | DAHKSEVAHRFKDLGEENFKALVLIAFAQYLQQCPFEDHVKLVNEVTEFA |
| GGGGSGGGGSGGGGS as shown | KTCVADESAENCDKSLHTLFGDKLCTVATLRETYGEMADCCAKQEPERNE |
| or anything other GS | CFLQHKDDNPNLPRLVRPEVDVMCTAFHDNEETFLKKYLYEIARRHPYFY |
| containingin linker) | APELLFFAKRYKAAFTECCQAADKAACLLPKLDELRDEGKASSAKQRLKC |
| | ASLQKFGERAFKAWAVARLSQRFPKAEFAEVSKLVTDLTKVHTECCHGDL |
| | LECADDRADLAKYICENQDSISSKLKECCEKPLLEKSHCIAEVENDEMPA |
| | DLPSLAADFVESKDVCKNYAEAKDVFLGMFLYEYARRHPDYSVVLLLRLA |
| | KTYETTLEKCCAAADPHECYAKVFDEFKPLVEEPQNLIKQNCELFEQLGE |
| | YKFQNALLVRYTKKVPQVSTPTLVEVSRNLGKVGSKCCKHPEAKRMPCAE |
| | DYLSVVLNQLCVLHEKTPVSDRVTKCCTESLVNRRPCFSALEVDETYVPK |
| | EFNAETFTFHADICTLSEKERQIKKQTALVELVKHKPKATKEQLKAVMDD |
| | FAAFVEKCCKADDKETCFAEEGKKLVAASQAALGLGGGGSGGGGSGGGG |
| | SAPTSSSTKKTQLQLEHLLLDLQMILNGINNYKNPKLTRMLTFKFYMPKK |
| | ATELKHLQCLEEELKPLEEVLNLASSKNFHFDPRDVVSNINVFVLELKGS |
| | ETTFMCEYADETATIVEFLNRWITFCQSIISTLT |
| SEQ ID NO: 74 | H9G8-Albumin (H9G8 shown at C-terminal) |
| (GS linker can be | DAHKSEVAHRFKDLGEENFKALVLIAFAQYLQQCPFEDHVKLVNEVTEFA |
| GGGGSGGGGSGGGGS as shown | KTCVADESAENCDKSLHTLFGDKLCTVATLRETYGEMADCCAKQEPERNE |
| or anything other GS | CFLQHKDDNPNLPRLVRPEVDVMCTAFHDNEETFLKKYLYEIARRHPYFY |
| containingin linker) | APELLFFAKRYKAAFTECCQAADKAACLLPKLDELRDEGKASSAKQRLKC |
| | ASLQKFGERAFKAWAVARLSQRFPKAEFAEVSKLVTDLTKVHTECCHGDL |
| | LECADDRADLAKYICENQDSISSKLKECCEKPLLEKSHCIAEVENDEMPA |
| | DLPSLAADFVESKDVCKNYAEAKDVFLGMFLYEYARRHPDYSVVLLLRLA |
| | KTYETTLEKCCAAADPHECYAKVFDEFKPLVEEPQNLIKQNCELFEQLGE |
| | YKFQNALLVRYTKKVPQVSTPTLVEVSRNLGKVGSKCCKHPEAKRMPCAE |
| | DYLSVVLNQLCVLHEKTPVSDRVTKCCTESLVNRRPCFSALEVDETYVPK |
| | EFNAETFTFHADICTLSEKERQIKKQTALVELVKHKPKATKEQLKAVMDD |
| | FAAFVEKCCKADDKETCFAEEGKKLVAASQAALGLGGGGSGGGGSGGGG |
| | SAPTSSSTKKTQLQLEHLLLDLQMILNGINNYKNPKLTRMLTFKFYMPKK |
| | ATELKHLQCLEEELKPLEEVLNLANSKNFHFDPRDVVSNINVFVLELKGS |
| | ETTFMCEYADETATIVEFLNRWITFCQSIISTLT |
| SEQ ID NO: 75 | H9B1-Albumin (H9B1 shown at C-terminal) |
| (GS linker can be | DAHKSEVAHRFKDLGEENFKALVLIAFAQYLQQCPFEDHVKLVNEVTEFA |
| GGGGSGGGGSGGGGS as shown | KTCVADESAENCDKSLHTLFGDKLCTVATLRETYGEMADCCAKQEPERNE |
| or anything other GS | CFLQHKDDNPNLPRLVRPEVDVMCTAFHDNEETFLKKYLYEIARRHPYFY |
| containingin linker) | APELLFFAKRYKAAFTECCQAADKAACLLPKLDELRDEGKASSAKQRLKC |
| | ASLQKFGERAFKAWAVARLSQRFPKAEFAEVSKLVTDLTKVHTECCHGDL |
| | LECADDRADLAKYICENQDSISSKLKECCEKPLLEKSHCIAEVENDEMPA |
| | DLPSLAADFVESKDVCKNYAEAKDVFLGMFLYEYARRHPDYSVVLLLRLA |
| | KTYETTLEKCCAAADPHECYAKVFDEFKPLVEEPQNLIKQNCELFEQLGE |
| | YKFQNALLVRYTKKVPQVSTPTLVEVSRNLGKVGSKCCKHPEAKRMPCAE |
| | DYLSVVLNQLCVLHEKTPVSDRVTKCCTESLVNRRPCFSALEVDETYVPK |
| | EFNAETFTFHADICTLSEKERQIKKQTALVELVKHKPKATKEQLKAVMDD |
| | FAAFVEKCCKADDKETCFAEEGKKLVAASQAALGLGGGGSGGGGSGGGGS |
| | APTSSSTKKTQLQLEHLLLDLQMILNGINNYKNPKLTRMLTFKFYMPKKA |
| | TELKHLQCLEEELKPLEEVLNLANSKNFHFDPRDVVSNVNVFVLELKGSE |
| | TTFMCEYADETATIVEFLNRWITFCQSIISTLT |
| SEQ ID NO: 147 | MDNA11 (MDNA109FEAA-Albumin) |
| (GS linker can be | MYRMQLLSCIALSLALVTNS_APTSSSTKKTQLQLEHLLLDLQMI |
| GGGGSGGGGSGGGGS as shown | LNGINNYKNPKLTRMLTAKFYMPKKATELKHLQCLEEALKPLEEV |
| or anything other GS | LNLAQSKNFHFDPRDVVSNINVFVLELKGSETTFMCEYADETATI |
| containingin linker) | VEFLNRWITFSQSIISTLTGGGGSGGGGSGGGGSDAHKSEVAHRF |
| MDNA11 (MDNA109FEAA- | KDLGEENFKALVLIAFAQYLQQCPFEDHVKLVNEVTEFAKTCVAD |
| Albumin) | ESAENCDKSLHTLFGDKLCTVATLRETYGEMADCCAKQEPERNEC |
| | FLQHKDDNPNLPRLVRPEVDVMCTAFHDNEETFLKKYLYEIARRH |
| | PYFYAPELLFFAKRYKAAFTECCQAADKAACLLPKLDELRDEGKA |
| | SSAKQRLKCASLQKFGERAFKAWAVARLSQRFPKAEFAEVSKLVT |
| | DLTKVHTECCHGDLLECADDRADLAKYICENQDSISSKLKECCEK |
| | PLLEKSHCIAEVENDEMPADLPSLAADFVESKDVCKNYAEAKDVF |
| | LGMFLYEYARRHPDYSVVLLLRLAKTYETTLEKCCAAADPHECYA |
| | KVFDEFKPLVEEPQNLIKQNCELFEQLGEYKFQNALLVRYTKKVP |
| | QVSTPTLVEVSRNLGKVGSKCCKHPEAKRMPCAEDYLSVVLNQLC |
| | VLHEKTPVSDRVTKCCTESLVNRRPCFSALEVDETYVPKEFNAET |
| | FTFHADICTLSEKERQIKKQTALVELVKHKPKATKEQLKAVMDDF |
| | AAFVEKCCKADDKETCFAEEGKKLVAASQAALGL* |
| | Cys125 changed to Serine (underlined and |
| | bolded |

[0203] In some embodiments, the IL-2 mutein-Fc fusion comprises one of the following sequences:

TABLE 7
List of Amino Acid Sequences

| SEQ ID NO: | |
|---|---|
| (Information) | Amino acid sequence |
| SEQ ID NO: 76 | MYRMQLLSCIALSLALVTNSAPTSSSTKKTQLQLEHLLLDLQMILNGINNYKNPK |
| (also listed | LTRMLTFKFYMPKKATELKHLQCLEE |
| herein as SEQ | ELKPLEEVLNLAQSKNFHLRPRDLISNINVIVLELKGSETTFMCEYADETATIVE |
| ID NO: 11) | FLNRWITFCQSIISTLTGGGGSGGGG |
| | SGGGGSDKTHTCPPCPAPELLGGPSVFLFPPKPKDTLMISRTPEVTCVVVDVSHE |
| | DPEVKFNWYVDGVEVHNAKTKPREEQ |
| | YASTYRVVSVLTVLHQDWLNGKEYKCKVSNKALPAPIEKTISKAKGQPREPQVYT |
| | LPPSREEMTKNQVSLTCLVKGFYPSD |
| | IAVEWESNGQPENNYKTTPPVLDSDGSFFLYSKLTVDKSRWQQGNVFSCSVMHEA |
| | LHNHYTQKSLSLSPGK* |
| SEQ ID NO: 77 | MYRMQLLSCIALSLALVTNSAPTSSSTKKTQLQLEHLLLDLQMILNGINNYKNPK |
| (also listed | LTRMLTFKFYMPKKATELKHLQCLEE |
| herein as SEQ | ELKPLEEVLNLAQSKNFHFDPRDVVSNINVFVLELKGSETTFMCEYADETATIVE |
| ID NO: 12) | FLNRWITFCQSIISTLTGGGGSGGGG |
| | SGGGGSDKTHTCPPCPAPELLGGPSVFLFPPKPKDTLMISRTPEVTCVVVDVSHE |
| | DPEVKFNWYVDGVEVHNAKTKPREEQ |
| | YASTYRVVSVLTVLHQDWLNGKEYKCKVSNKALPAPIEKTISKAKGQPREPQVYT |
| | LPPSREEMTKNQVSLTCLVKGFYPSD |
| | IAVEWESNGQPENNYKTTPPVLDSDGSFFLYSKLTVDKSRWQQGNVFSCSVMHEA |
| | LHNHYTQKSLSLSPGK* |
| SEQ ID NO: 78 | MYRMQLLSCIALSLALVTNSAPTSSSTKKTQLQLEHLLLDLQMILNGINNYKNPK |
| (also listed | LTRMLTAKFAMPKKATELKHLQCLEE |
| herein as SEQ | ELKPLEEVLNLAQSKNFHFDPRDVVSNINVFVLELKGSETTFMCEYADETATIVE |
| ID NO: 13) | FLNRWITFCQSIISTLTGGGGSGGGG |
| | SGGGGSDKTHTCPPCPAPELLGGPSVFLFPPKPKDTLMISRTPEVTCVVVDVSHE |
| | DPEVKFNWYVDGVEVHNAKTKPREEQ |
| | YASTYRVVSVLTVLHQDWLNGKEYKCKVSNKALPAPIEKTISKAKGQPREPQVYT |
| | LPPSREEMTKNQVSLTCLVKGFYPSD |
| | IAVEWESNGQPENNYKTTPPVLDSDGSFFLYSKLTVDKSRWQQGNVFSCSVMHEA |
| | LHNHYTQKSLSLSPGK* |
| SEQ ID NO: 79 | MYRMQLLSCIALSLALVTNSAPTSSSTKKTQLQLEHLLLDLQMILNGINNYKNPK |
| (also listed | LTRMLTAKFYMPKKATELKHLQCLEE |
| herein as SEQ | ALKPLEEVLNLAQSKNFHFDPRDVVSNINVFVLELKGSETTFMCEYADETATIVE |
| ID NO: 14) | FLNRWITFCQSIISTLTGGGGSGGGG |
| | SGGGGSDKTHTCPPCPAPELLGGPSVFLFPPKPKDTLMISRTPEVTCVVVDVSHE |
| | DPEVKFNWYVDGVEVHNAKTKPREEQ |
| | YASTYRVVSVLTVLHQDWLNGKEYKCKVSNKALPAPIEKTISKAKGQPREPQVYT |
| | LPPSREEMTKNQVSLTCLVKGFYPSD |
| | IAVEWESNGQPENNYKTTPPVLDSDGSFFLYSKLTVDKSRWQQGNVFSCSVMHEA |
| | LHNHYTQKSLSLSPGK* |
| SEQ ID NO: 80 | MYRMQLLSCIALSLALVTNSAPTSSSTKKTQLQLEHLLLDLQMILNGINNYKNPK |
| (also listed | LTRMLTAKFAMPKKATELKHLQCLEE |
| herein as SEQ | ALKPLEEVLNLAQSKNFHFDPRDVVSNINVFVLELKGSETTFMCEYADETATIVE |
| ID NO: 15) | FLNRWITFCQSIISTLTGGGGSGGGG |
| | SGGGGSDKTHTCPPCPAPELLGGPSVFLFPPKPKDTLMISRTPEVTCVVVDVSHE |
| | DPEVKFNWYVDGVEVHNAKTKPREEQ |
| | YASTYRVVSVLTVLHQDWLNGKEYKCKVSNKALPAPIEKTISKAKGQPREPQVYT |
| | LPPSREEMTKNQVSLTCLVKGFYPSD |
| | IAVEWESNGQPENNYKTTPPVLDSDGSFFLYSKLTVDKSRWQQGNVFSCSVMHEA |
| | LHNHYTQKSLSLSPGK* |

[0204] In some embodiments, the IL-2 mutein sequence is 90% identical to any one of SEQ ID NO: 12 through SEQ ID NO:15 and/or SEQ ID NO:20 through SEQ ID NO:80 (for example, any of the IL-2 sequences provided herein). In some embodiments, the IL-2 mutein sequence is 95% identical to any one of SEQ ID NO:12 through SEQ ID NO:15 and/or SEQ ID NO:20 through SEQ ID NO:80 (for example, any of the IL-2 sequences provided herein). In some embodiments, the IL-2 mutein sequence is 98% identical to any one of SEQ ID NO:12 through SEQ ID NO:15 and/or SEQ ID NO:20 through SEQ ID NO:80 (for example, any of the IL-2 sequences provided herein). In some embodiments, the IL-2 mutein sequence is 99% identical to any one of SEQ ID NO: 12 through SEQ ID NO:15 and/or SEQ ID NO:20 through SEQ ID NO:80 (for example, any of the IL-2 sequences provided herein).

[0205] C. IL-4, IL-13, IL-10, IL-12, IL15, and IL-18 for Use in Bispecific IL-2 Cytokine Fusions

[0206] In some embodiments, an IL-2 mutein can be fused to an IL-4 mutein as described herein. In some embodiments, an IL-2 mutein can be fused to an IL-13 mutein as described herein. In some embodiments, an IL-2 mutein can be fused to an IL-10. In some embodiments, an IL-2 mutein can be fused to an IL-12. In some embodiments, an IL-2 mutein can be fused to an IL-15. In some embodiments, an IL-2 mutein can be fused to an IL-18. In some embodiments, such fusions function to specifically target cancer cells and/or cancer stem cells and reduce or inhibit cancer stem cell growth, as well as targeting the immunosuppressive cells in the tumor microenvironment (TME).

[0207] Any IL-13 sequence or variant thereof can be used in a fusion with an IL-2 mutein as described herein. In some embodiments, the IL-2 mutein incudes any one of 5-1 SEQ ID NO:5; 5-2 SEQ ID NO:6; 6-6 SEQ ID NO:7; A2 SEQ ID NO:8; B1 SEQ ID NO:9; B11 SEQ ID NO:10; C5 SEQ ID NO:11; D10 SEQ ID NO:12; E10 SEQ ID NO:13; G8 SEQ ID NO:14; H4 SEQ ID NO:15; and H9 SEQ ID NO:16. Exemplary IL-13 polypeptide sequences are provided in SEQ ID NO:81-SEQ ID NO:128, as well as the table below. In some embodiments, the IL-13 polypeptide sequence is as provided in any one of SEQ ID NO:81-SEQ ID NO:128. In some embodiments, the IL-13 polypeptide sequence is SEQ ID NO:81. In some embodiments, the IL-13 polypeptide sequence is SEQ ID NO:82. In some embodiments, the IL-13 polypeptide sequence is SEQ ID NO:83. In some embodiments, the IL-13 polypeptide sequence is SEQ ID NO:84. In some embodiments, the IL-13 polypeptide sequence is SEQ ID NO:85. In some embodiments, the IL-13 polypeptide sequence is SEQ ID NO:86. In some embodiments, the IL-13 polypeptide sequence is SEQ ID NO:87. In some embodiments, the IL-13 polypeptide sequence is SEQ ID NO:88. In some embodiments, the IL-13 polypeptide sequence is SEQ ID NO:89. In some embodiments, the IL-13 polypeptide sequence is SEQ ID NO:90. In some embodiments, the IL-13 polypeptide sequence is SEQ ID NO:91. In some embodiments, the IL-13 polypeptide sequence is SEQ ID NO:92. In some embodiments, the IL-13 polypeptide sequence is SEQ ID NO:93. In some embodiments, the IL-13 polypeptide sequence is SEQ ID NO:94. In some embodiments, the polypeptide sequence is SEQ ID NO:95. In some embodiments, the IL-13 polypeptide sequence is SEQ ID NO:96. In some embodiments, the IL-13 polypeptide sequence is SEQ ID NO:97. In some embodiments, the IL-13 polypeptide sequence is SEQ ID NO:98. In some embodiments, the IL-13 polypeptide sequence is SEQ ID NO:99. In some embodiments, the polypeptide sequence is SEQ ID NO: 100. In some embodiments, the IL-13 polypeptide sequence is SEQ ID NO:101. In some embodiments, the IL-13 polypeptide sequence is SEQ ID NO:102. In some embodiments, the IL-13 polypeptide sequence is SEQ ID NO:103. In some embodiments, the IL-13 polypeptide sequence is SEQ ID NO:104. In some embodiments, the IL-13 polypeptide sequence is SEQ ID NO:105. In some embodiments, the IL-13 polypeptide sequence is SEQ ID NO:106. In some embodiments, the IL-13 polypeptide sequence is SEQ ID NO:107. In some embodiments, the IL-13 polypeptide sequence is SEQ ID NO:108. In some embodiments, the IL-13 polypeptide sequence is SEQ ID NO:109. In some embodiments, the IL-13 polypeptide sequence is SEQ ID NO:110. In some embodiments, the polypeptide sequence is SEQ ID NO:111. In some embodiments, the IL-13 polypeptide sequence is SEQ ID NO:112. In some embodiments, the IL-13 polypeptide sequence is SEQ ID NO:113. In some embodiments, the IL-13 polypeptide sequence is SEQ ID NO:114. In some embodiments, the IL-13 polypeptide sequence is SEQ ID NO:115. In some embodiments, the IL-13 polypeptide sequence is SEQ ID NO:116. In some embodiments, the IL-13 polypeptide sequence is SEQ ID NO:117. In some embodiments, the IL-13 polypeptide sequence is SEQ ID NO:118. In some embodiments, the IL-13 polypeptide sequence is SEQ ID NO:119. In some embodiments, the IL-13 polypeptide sequence is SEQ ID NO:120. In some embodiments, the IL-13 polypeptide sequence is SEQ ID NO:121. In some embodiments, the IL-13 polypeptide sequence is SEQ ID NO:122. In some embodiments, the IL-13 polypeptide sequence is SEQ ID NO:123. In some embodiments, the IL-13 polypeptide sequence is SEQ ID NO:124. In some embodiments, the IL-13 polypeptide sequence is SEQ ID NO:125. In some embodiments, the IL-13 polypeptide sequence is SEQ ID NO:126. In some embodiments, the IL-13 polypeptide sequence is SEQ ID NO:127. In some embodiments, the IL-13 polypeptide sequence is SEQ ID NO:128. IL-13 In some embodiments, the IL-13 polypeptide sequence is 90% identical to any one of SEQ ID NO:81 through SEQ ID NO:128. In some embodiments, the IL-13 polypeptide sequence is 95% identical to any one of SEQ ID NO:81 through SEQ ID NO:128. In some embodiments, the IL-13 polypeptide sequence is 98% identical to any one of SEQ ID NO:81 through SEQ ID NO:128. In some embodiments, the IL-13 polypeptide sequence is 99% identical to any one of SEQ ID NO:81 through SEQ ID NO: 128.

[0208] In some embodiments, any one of SEQ ID NO:81-SEQ ID NO:128 are linked to an IL-2 or IL-2 mutein as described herein. In some embodiments, SEQ ID NO: 81 is linked to an IL-2 or IL-2 mutein as described herein. In some embodiments, SEQ ID NO:82 is linked to an IL-2 or IL-2 mutein as described herein. In some embodiments, SEQ ID NO:83 is linked to an IL-2 or IL-2 mutein as described herein. In some embodiments, SEQ ID NO:84 is linked to an IL-2 or IL-2 mutein as described herein. In some embodiments, SEQ ID NO:85 is linked to an IL-2 or IL-2 mutein as described herein. In some embodiments, SEQ ID NO:86 is linked to an IL-2 or IL-2 mutein as described herein. In some embodiments, SEQ ID NO:87 is linked to an IL-2 or IL-2 mutein as described herein. In some embodiments, SEQ ID NO:88 is linked to an IL-2 or IL-2 mutein as described herein. In some embodiments, SEQ ID NO:89 is linked to an IL-2 or IL-2 mutein as described herein. In some embodiments, SEQ ID NO:90 is linked to an IL-2 or IL-2 mutein as described herein. In some embodiments, SEQ ID NO:91 is linked to an IL-2 or IL-2 mutein as described herein. In some embodiments, SEQ ID NO:92 is linked to an IL-2 or IL-2 mutein as described herein. In some embodiments, SEQ ID NO:93 is linked to an IL-2 or IL-2 mutein as described herein. In some embodiments, SEQ ID NO:94 is linked to an IL-2 or IL-2 mutein as described herein. In some embodiments, SEQ ID NO:94 is linked to an IL-2 or IL-2 mutein as described herein. In some embodiments, SEQ ID NO:96 is linked to an IL-2 or IL-2 mutein as described herein. In some embodiments, SEQ ID NO:97 is linked to an IL-2 or IL-2 mutein as described herein. In some embodiments, SEQ ID NO:98 is linked to an IL-2 or IL-2 mutein as described herein. In some embodiments, SEQ ID NO:99 is linked to an IL-2 or IL-2 mutein as described herein. In some embodiments, SEQ ID NO:100 is linked to an IL-2 or IL-2 mutein as described herein. In some embodiments, SEQ ID NO:101 is linked to an IL-2 or IL-2 mutein as described herein. In some embodiments, SEQ ID NO:102 is linked to an IL-2 or IL-2 mutein as described herein. In some embodiments, SEQ ID NO:103 is linked to an IL-2 or IL-2 mutein as described herein. In some embodiments, SEQ ID NO:104 is linked to an IL-2 or IL-2 mutein as described herein. In some embodiments, SEQ ID NO:105 is linked to an IL-2 or IL-2 mutein as described herein. In some embodiments, SEQ ID NO:106 is linked to an IL-2 or IL-2 mutein as described herein. In some embodiments, SEQ ID NO:107 is linked to an IL-2 or IL-2 mutein as described herein. In some embodiments, SEQ ID NO:108 is linked to an IL-2 or IL-2 mutein as described herein. In some embodiments, SEQ ID NO:109 is linked to an IL-2 or IL-2 mutein as described herein. In some embodiments, SEQ ID NO:110 is linked to an IL-2 or IL-2 mutein as described herein. In some embodiments, SEQ ID NO:111 is linked to an IL-2 or IL-2 mutein as described herein. In some embodiments, SEQ ID NO:112 is linked to an IL-2 or IL-2 mutein as described herein. In some embodiments, SEQ ID NO:113 is linked to an IL-2 or IL-2 mutein as described herein. In some embodiments, SEQ ID NO:114 is linked to an IL-2 or IL-2 mutein as described herein. In some embodiments, SEQ ID NO:115 is linked to an IL-2 or IL-2 mutein as described herein. In some embodiments, SEQ ID NO:116 is linked to an IL-2 or IL-2 mutein as described herein. In some embodiments, SEQ ID NO:117 is linked to an IL-2 or IL-2 mutein as described herein. In some embodiments, SEQ ID NO:118 is linked to an IL-2 or IL-2 mutein as described herein. In some embodiments, SEQ ID NO:119 is linked to an IL-2 or IL-2 mutein as described herein. In some embodiments, SEQ ID NO:120 is linked to an IL-2 or IL-2 mutein as described herein. In some embodiments, SEQ ID NO:121 is linked to an IL-2 or IL-2 mutein as described herein. In some embodiments, SEQ ID NO:122 is linked to an IL-2 or IL-2 mutein as described herein. In some embodiments, SEQ ID NO:123 is linked to an IL-2 or IL-2 mutein as described herein. In some embodiments, SEQ ID NO:124 is linked to an IL-2 or IL-2 mutein as described herein. In some embodiments, SEQ ID NO:125 is linked to an IL-2 or IL-2 mutein as described herein. In some embodiments, SEQ ID NO:126 is linked to an IL-2 or IL-2 mutein as described herein. In some embodiments, SEQ ID NO:127 is linked to an IL-2 or IL-2 mutein as described herein. In some embodiments, SEQ ID NO:128 is linked to an IL-2 or IL-2 mutein as described herein. In some embodiments, the IL-2 mutein incudes any one of 5-1 SEQ ID NO:5; 5-2 SEQ ID NO:6; 6-6 SEQ ID NO:7; A2 SEQ ID NO:8; B1 SEQ ID NO:9; B11 SEQ ID NO: 10; C5 SEQ ID NO: 11; D10 SEQ ID NO: 12; E10 SEQ ID NO: 13; G8 SEQ ID NO: 14; H4 SEQ ID NO:15; and H9 SEQ ID NO:16.

[0209] In some embodiments an IL-13 peptide of the invention comprises one or more of the amino acids substitutions: (1) L10F, L10I, L10V, L10A, L10D, L10T, L10H; (2) R11S, R11N, R11H, R11L, R11I; (3) 114L, 114F, 114V, 114M; (4) V18L, V18F, V181; (5) E12A, (6) R65D, (7) R86K, R86T, R86M; (8) D87E, D87K, D87R, D87G, D87S; (9) T881, T88K, T88R; (10) K89R, K89T, K89M; (11) L101F, L101I, L101Y, L101H, L101N; (12) K104R, K104T, K104M; (13) K105T, K105A, K105R, K105E; (14) F107L, F1071, F107V, F107M; and (15) R108K, R108T, R108M, which substitutions cause an altered affinity for one or both of IL-13Rα1 and IL-13Rα2. In other embodiments, modified residues are at two or more, three or more, four or more, five or more, and not more than 14 amino acids within the combined set of contact residues defined above. As described in International Patent Publication WO 2013/112871, the disclosure of which is incorporated by reference herein in its entirety. In some embodiments, amino acid substitutions include without limitation those provided in FIG. 4.

[0210] Sets of modifications may include the following specific changes: (1) L10H; L10A; (2) R11L; (4) V181; (7) R86M; R86K; R86T; (8) D87K; D87G; (9) T88R, T88S; T88K; (10) K89R; (11) L101N; (12) K104R; (13) K105A; K105E; (14) R108K. In some embodiments, the modification includes any one of the recited specific changes. In some embodiments, the modification includes L10H. In some embodiments, the modification includes L10A. In some embodiments, the modification includes R11L. In some embodiments, the modification includes V181. In some embodiments, the modification includes R86M. In some embodiments, the modification includes R86K. In some embodiments, the modification includes R86T. In some embodiments, the modification includes D87K. In some embodiments, the modification includes D87G. In some embodiments, the modification includes T88R. In some embodiments, the modification includes T88S. In some embodiments, the modification includes T88K. In some embodiments, the modification includes K89R. In some embodiments, the modification includes L101N. In some embodiments, the modification includes K104R. In some embodiments, the modification includes K1T05A. In some embodiments, the modification includes K105E. In some embodiments, the modification includes R108K. In some embodiments, the polypeptide comprising the one or more modifications is linked to an IL-2 or IL-2 mutein as described herein. In some embodiments, amino acid substitutions include without limitation those provided in FIG. 4. In some embodiments, the IL-2 mutein incudes any one of 5-1 SEQ ID NO:5; 5-2 SEQ ID NO:6; 6-6 SEQ ID NO:7; A2 SEQ ID NO: 8; B1 SEQ ID NO:9; B11 SEQ ID NO: 10; C5 SEQ ID NO: 11; D10 SEQ ID NO:12; E10 SEQ ID NO: 13; G8 SEQ ID NO: 14; H4 SEQ ID NO: 15; and H9 SEQ ID NO:16.

[0211] Specific sets of modifications that provide for greater selectivity in binding to IL-13Rα2 versus IL-13Rα1 relative to a native IL-13 sequence may include, without limitation:
[0212] [L10D, R11, V18I, R86K, D87K, k89R, R108K] (for example, C2, e.g. SEQ ID NO:31 or SEQ ID NO:49)
[0213] [L10A, R86T, D87G, T88K, K89R, L101N, K104R, K105A, R108K] (for example, C3, e.g. SEQ ID NO:32 or SEQ ID NO:50)
[0214] [L10V, K89R, L101N, K105E, R108T] (for example, C4, e.g. SEQ ID NO:33 or SEQ ID NO:31)
[0215] [R11S, I14M, T88S, L101N, K105A, R108K] (for example, C7, e.g. SEQ ID NO:34 or SEQ ID NO:52)
[0216] [L10H, R11L, V18I, R86K, D87E, K89R, L101N, K105T, R108K] (C9, e.g. SEQ ID NO:53)
[0217] [L10H, R86T, D87G, T88R, R108K] (C11e.g. SEQ ID NO:38 or SEQ ID NO:55)
[0218] [L10A, V18F, R86K, D87K, K89R, L101I, K104R, R108K] (D7, e.g. SEQ ID NO:40 or SEQ ID NO:57)
[0219] [L10T/D; R11I; V181; R86K; D87K/G; T88S; K89R; L101Y; K104R; K105T; R108K]
[0220] [L10A/V; R86T; D87G; T88K; K89R; L101N; K104R; K105A/E; R108K/T]

[0221] In some embodiments, the set of modifications comprises L10V, K89R, L101N, K105E, R108T. In some embodiments, the set of modifications comprises R11S, 114M, T88S, L101N, K105A, and R108K (C7, e.g. SEQ ID NO:35 or SEQ ID NO:52). In some embodiments, the set of modifications comprises L10H, R11L, V18I, R86K, D87E, K89R, L101N, K105T, and R108K (C9, e.g. SEQ ID NO:36 or SEQ ID NO:53). In some embodiments, the set of modifications comprises L10H, R86T, D87G, T88R, and R108K (C11 e.g. SEQ ID NO:38 or SEQ ID NO:55). In some embodiments, the set of modifications comprises L10A, V18F, R86K, D87K, K89R, L101I, K104R, and R108K (D7, e.g. SEQ ID NO:40 or SEQ ID NO:57). In some embodiments, the set of modifications comprises L10T/D, R11I, V181, R86K, D87K/G, T88S, K89R, L101Y, K104R, K105T, and R108K. In some embodiments, the set of modifications comprises L10T, R11I, V181, R86K, D87K, T88S, K89R, L101Y, K104R, K105T, and R108K. In some embodiments, the set of modifications comprises L10T, R11I, V181, R86K, D87G, T88S, K89R, L101Y, K104R, K105T, and R108K. In some embodiments, the set of modifications comprises L10D, R11I, V18I, R86K, D87K, T88S, K89R, L101Y, K104R, K105T, and R108K. In some embodiments, the set of modifications comprises L10D, R11I, V18I, R86K, D87G, T88S, K89R, L101Y, K104R, K105T, R108K. In some embodiments, the set of modifications comprises L10A/V, R86T, D87G, T88K, K89R, L101N, K104R, K105A/E, and R108K/T. In some embodiments, the set of modifications comprises L10A, R86T, D87G, T88K, K89R, L101N, K104R, K105A, and R108K. In some embodiments, the set of modifications comprises L10A, R86T, D87G, T88K, K89R, L101N, K104R, K105E, and R108K. In some embodiments, the set of modifications comprises L10A, R86T, D87G, T88K, K89R, L101N, K104R, K105A, and R108T. In some embodiments, the set of modifications comprises L10A, R86T, D87G, T88K, K89R, L101N, K104R, K105E, and R108T. In some embodiments, the set of modifications comprises L10V, R86T, D87G, T88K, K89R, L101N, K104R, K105A, and R108K. In some embodiments, the set of modifications comprises L10V, R86T, D87G, T88K, K89R, L101N, K104R, K105E, and R108K. In some embodiments, the set of modifications comprises L10V, R86T, D87G, T88K, K89R, L101N, K104R, K105A, an dR108T. In some embodiments, the set of modifications comprises L10V, R86T, D87G, T88K, K89R, L101N, K104R, K105E, and R108T. In some embodiments, the amino acid sequence is 90% identical. In some embodiments, the amino acid sequence is 95% identical. In some embodiments, the amino acid sequence is 98% identical. In some embodiments, the amino acid sequence is 99% identical. In some embodiments, the polypeptide comprising the one or more modifications is linked to an IL-2 or IL-2 mutein as described herein. In some embodiments, amino acid substitutions include without limitation those provided in FIG. 4. In some embodiments, the IL-2 mutein incudes any one of 5-1 SEQ ID NO:5; 5-2 SEQ ID NO:6; 6-6 SEQ ID NO:7; A2 SEQ ID NO:8; B1 SEQ ID NO:9; B11 SEQ ID NO: 10; C5 SEQ ID NO:11; D10 SEQ ID NO: 12; E10 SEQ ID NO: 13; G8 SEQ ID NO:14; H4 SEQ ID NO:15; and H9 SEQ ID NO:16.

[0222] Specific sets of modifications that provide for greater selectivity in binding to IL-13Rα1 v IL-13Rα2 relative to a native IL-13 sequence may include, without limitation:
[0223] [L10V, V18I, D87S, D88S, L101F, K104R, K105T]
[0224] [R11S, V18I, R86K, D87G, T88S, K89M, L101Y, K104R, K105T]
[0225] [L10V, V18I, D87S, T88S, L101F, K104R, K105T]
[0226] [L10V/I; D87S; T88S; K89R; L101H/F; K104R; K105T]
[0227] [L10I; V18I; R86T; D87G; T88S; K89R; L101Y/H; K104R; K105A]
[0228] [L10V; V18I; D87S; T88S; L101F; K104R; K105T]
[0229] [V181, R86T, D87G, T88S, L101Y, K104R, K105A]
[0230] [R11I, V18I, R86K, D87G, T88S, L101H, K104R, K105A, F107M]
[0231] which substitutions are optionally combined with the substitutions [E12A/G/S, R65D/E].

[0232] In some embodiments, the set of modifications comprises L10V, V18I, D87S, D88S, L101F, K104R, and K105T. In some embodiments, the set of modifications comprises R11S, V181, R86K, D87G, T88S, K89M, L101Y, K104R, and K105T. In some embodiments, the set of modifications comprises L10V, V18I, D87S, T88S, L101F, K104R, and K105T. In some embodiments, the set of modifications comprises L10V/I, D87S, T88S, K89R, L101H/F, K104R, and K105T. In some embodiments, the set of modifications comprises L10I, V181, R86T, D87G, T88S, K89R, L101Y/H, K104R, and K105A. In some embodiments, the set of modifications comprises L10V, V18I, D87S, T88S, L101F, K104R, and K105T. In some embodiments, the set of modifications comprises V18I, R86T, D87G, T88S, L101Y, K104R, and K105A. In some embodiments, the set of modifications comprises R11, V18I, R86K, D87G, T88S, L101H, K104R, K105A, and F107M. In some embodiments, the set of modifications comprises L10V, V18I, D87S, D88S, L101F, K104R, K105T, E12A/G/S, and R65D/E. In some embodiments, the set of modifications comprises R11S, V18I, R86K, D87G, T88S, K89M, L101Y, K104R, K105T, E12A/G/S, and R65D/E. In some embodiments, the set of modifications comprises L10V, V181, D87S, T88S, L101F, K104R, K105T, E12A/G/S, and R65D/E. In some embodiments, the set of modifications comprises L10V/I, D87S, T88S, K89R, L101H/F, K104R, K105T, E12A/G/S, and R65D/E. In some embodiments, the set of modifications comprises L10I, V18I, R86T, D87G, T88S, K89R, L101Y/H, K104R, K105A, E12A/G/S, and R65D/E. In some embodiments, the set of modifications comprises L10V, V18I, D87S, T88S, L101F, K104R, K105T, E12A/G/S, and R65D/E. In some embodiments, the set of modifications comprises V181, R86T, D87G, T88S, L101Y, K104R, K105A, E12A/G/S, and R65D/E. In some embodiments, the set of modifications comprises R11I, V18I, R86K, D87G, T88S, L101H, K104R, K105A, F107M, E12A/G/S, and R65D/E. In some embodiments, the set of modifications comprises L10V, V18I, D87S, D88S, L101F, K104R, K105T, E12A, and R65D/E. In some embodiments, the set of modifications comprises R11S, V18I, R86K, D87G, T88S, K89M, L101Y, K104R, K105T, E12A, and R65D/E. In some embodiments, the set of modifications comprises L10V, V18I, D87S, T88S, L101F, K104R, K105T, E12A, and R65D/E. In some embodiments, the set of modifications comprises L10V/I, D87S, T88S, K89R, L101H/F, K104R, K105T, E12A, and R65D/E. In some embodiments, the set of modifications comprises L10I, V18I, R86T, D87G, T88S, K89R, L101Y/H, K104R, K105A, E12A, and R65D/E. In some embodiments, the set of modifications comprises L10V, V18I, D87S, T88S, L101F, K104R, K105T, E12A, and R65D/E. In some embodiments, the set of modifications comprises V18I, R86T, D87G, T88S, L101Y, K104R, K105A, E12A, and R65D/E. In some embodiments, the set of modifications comprises R11, V181, R86K, D87G, T88S, L101H, K104R, K105A, F107M, E12A, and R65D/E. In some embodiments, the set of modifications comprises L10V, V18I, D87S, D88S, L101F, K104R, K105T, E12G, and R65D/E. In some embodiments, the set of modifications comprises R11S, V18I, R86K, D87G, T88S, K89M, L101Y, K104R, K105T, E12G, and R65D/E. In some embodiments, the set of modifications comprises L10V, V18I, D87S, T88S, L101F, K104R, K105T, E12A/G/S, and R65D/E. In some embodiments, the set of modifications comprises L10V/I, D87S, T88S, K89R, L101H/F, K104R, K105T, E12G, and R65D/E. In some embodiments, the set of modifications comprises L10I, V18I, R86T, D87G, T88S, K89R, L101Y/H, K104R, K105A, E12G, and R65D/E. In some embodiments, the set of modifications comprises L10V, V18I, D87S, T88S, L101F, K104R, K105T, E12G, and R65D/E. In some embodiments, the set of modifications comprises V181, R86T, D87G, T88S, L101Y, K104R, K105A, E12G, and R65D/E. In some embodiments, the set of modifications comprises R11I, V18I, R86K, D87G, T88S, L101H, K104R, K105A, F107M, E12G, and R65D/E. In some embodiments, the set of modifications comprises L10V, V18I, D87S, D88S, L101F, K104R, K105T, E12S, and R65D/E. In some embodiments, the set of modifications comprises R11S, V18I, R86K, D87G, T88S, K89M, L101Y, K104R, K105T, E12A/G/S, and R65D/E. In some embodiments, the set of modifications comprises L10V, V18I, D87S, T88S, L101F, K104R, K105T, E12S, and R65D/E. In some embodiments, the set of modifications comprises L10V/I, D87S, T88S, K89R, L101H/F, K104R, K105T, E12S, and R65D/E. In some embodiments, the set of modifications comprises L10I, V18I, R86T, D87G, T88S, K89R, L101Y/H, K104R, K105A, E12S, and R65D/E. In some embodiments, the set of modifications comprises L10V, V181, D87S, T88S, L101F, K104R, K105T, E12S, and R65D/E. In some embodiments, the set of modifications comprises V18I, R86T, D87G, T88S, L101Y, K104R, K105A, E12S, and R65D/E. In some embodiments, the set of modifications comprises R11, V18I, R86K, D87G, T88S, L101H, K104R, K105A, F107M, E12S, and R65D/E. In some embodiments, the set of modifications comprises L10V, V18I, D87S, D88S, L101F, K104R, K105T, E12A, and R65D. In some embodiments, the set of modifications comprises R11S, V181, R86K, D87G, T88S, K89M, L101Y, K104R, K105T, E12A, and R65E. In some embodiments, the set of modifications comprises L10V, V181, D87S, T88S, L101F, K104R, K105T, E12A, and R65D. In some embodiments, the set of modifications comprises L10V/I, D87S, T88S, K89R, L101H/F, K104R, K105T, E12A, and R65D. In some embodiments, the set of modifications comprises L10I, V18I, R86T, D87G, T88S, K89R, L101Y/H, K104R, K105A, E12A, and R65D. In some embodiments, the set of modifications comprises L10V, V18I, D87S, T88S, L101F, K104R, K105T, E12A, and R65D. In some embodiments, the set of modifications comprises V18I, R86T, D87G, T88S, L101Y, K104R, K105A, E12A, and R65D. In some embodiments, the set of modifications comprises R11, V18I, R86K, D87G, T88S, L101H, K104R, K105A, F107M, E12A, and R65D. In some embodiments, the set of modifications comprises L10V, V18I, D87S, D88S, L101F, K104R, K105T, E12G, and R65D. In some embodiments, the set of modifications comprises R11S, V18I, R86K, D87G, T88S, K89M, L101Y, K104R, K105T, E12G, and R65D. In some embodiments, the set of modifications comprises L10V, V18I, D87S, T88S, L101F, K104R, K105T, E12A/G/S, and R65D. In some embodiments, the set of modifications comprises L10V/I, D87S, T88S, K89R, L101H/F, K104R, K105T, E12G, and R65D. In some embodiments, the set of modifications comprises L10I, V18I, R86T, D87G, T88S, K89R, L101Y/H, K104R, K105A, E12G, and R65D. In some embodiments, the set of modifications comprises L10V, V18I, D87S, T88S, L101F, K104R, K105T, E12G, and R65D. In some embodiments, the set of modifications comprises V181, R86T, D87G, T88S, L101Y, K104R, K105A, E12G, and R65D. In some embodiments, the set of modifications comprises R11, V181, R86K, D87G, T88S, L101H, K104R, K105A, F107M, E12G, and R65D. In some embodiments, the set of modifications comprises L10V, V18I, D87S, D88S, L101F, K104R, K105T, E12S, and R65D. In some embodiments, the set of modifications comprises R11S, V18I, R86K, D87G, T88S, K89M, L101Y, K104R, K105T, E12S, and R65D. In some embodiments, the set of modifications comprises L10V, V18I, D87S, T88S, L101F, K104R, K105T, E12S, and R65D. In some embodiments, the set of modifications comprises L10V/I, D87S, T88S, K89R, L101H/F, K104R, K105T, E12S, and R65D. In some embodiments, the set of modifications comprises L10I, V18I, R86T, D87G, T88S, K89R, L101Y/H, K104R, K105A, E12S, and R65D. In some embodiments, the set of modifications comprises L10V, V18I, D87S, T88S, L101F, K104R, K105T, E12S, and R65D. In some embodiments, the set of modifications comprises V18I, R86T, D87G, T88S, L101Y, K104R, K105A, E12S, and R65D. In some embodiments, the set of modifications comprises Ri 11, V18I, R86K, D87G, T88S, L101H, K104R, K105A, F107M, E12S, and R65D. In some embodiments, the set of modifications comprises L10V, V18I, D87S, D88S, L101F, K104R, K105T, E12A, and R65E. In some embodiments, the set of modifications comprises R11S, V18I, R86K, D87G, T88S, K89M, L101Y, K104R, K105T, E12A, and R65E. In some embodiments, the set of modifications comprises L10V, V18I, D87S, T88S, L101F, K104R, K105T, E12A, and R65E. In some embodiments, the set of modifications comprises L10V/I, D87S, T88S, K89R, L101H/F, K104R, K105T, E12A, and R65E. In some embodiments, the set of modifications comprises L10I, V18I, R86T, D87G, T88S, K89R, L101Y/H, K104R, K105A, E12A, and R65E. In some embodiments, the set of modifications comprises L10V, V18I, D87S, T88S, L101F, K104R, K105T, E12A, and R65E. In some embodiments, the set of modifications comprises V181, R86T, D87G, T88S, L101Y, K104R, K105A, E12A, and R65E. In some embodiments, the set of modifications comprises R11I, V18I, R86K, D87G, T88S, L101H, K104R, K105A, F107M, E12A, and R65E. In some embodiments, the set of modifications comprises L10V, V18I, D87S, D88S, L101F, K104R, K105T, E12G, and R65E. In some embodiments, the set of modifications comprises R11S, V18I, R86K, D87G, T88S, K89M, L101Y, K104R, K105T, E12G, and R65E. In some embodiments, the set of modifications comprises L10V, V18I, D87S, T88S, L101F, K104R, K105T, E12A/G/S, and R65E. In some embodiments, the set of modifications comprises L10V/I, D87S, T88S, K89R, L101H/F, K104R, K105T, E12G, and R65E. In some embodiments, the set of modifications comprises L10I, V18I, R86T, D87G, T88S, K89R, L101Y/H, K104R, K105A, E12G, and R65E. In some embodiments, the set of modifications comprises L10V, V18I, D87S, T88S, L101F, K104R, K105T, E12G, and R65E. In some embodiments, the set of modifications comprises V18I, R86T, D87G, T88S, L101Y, K104R, K105A, E12G, and R65E. In some embodiments, the set of modifications comprises R11I, V18I, R86K, D87G, T88S, L101H, K104R, K105A, F107M, E12G, and R65E. In some embodiments, the set of modifications comprises L10V, V181, D87S, D88S, L101F, K104R, K105T, E12S, and R65E. In some embodiments, the set of modifications comprises R11S, V181, R86K, D87G, T88S, K89M, L101Y, K104R, K105T, E12A/G/S, and R65E. In some embodiments, the set of modifications comprises L10V, V18I, D87S, T88S, L101F, K104R, K105T, E12S, and R65E. In some embodiments, the set of modifications comprises L10V/I, D87S, T88S, K89R, L101H/F, K104R, K105T, E12S, and R65E. In some embodiments, the set of modifications comprises L10I, V18I, R86T, D87G, T88S, K89R, L101Y/H, K104R, K105A, E12S, and R65E. In some embodiments, the set of modifications comprises L10V, V18I, D87S, T88S, L101F, K104R, K105T, E12S, and R65E. In some embodiments, the set of modifications comprises V18I, R86T, D87G, T88S, L101Y, K104R, K105A, E12S, and R65E. In some embodiments, the set of modifications comprises R11, V18I, R86K, D87G, T88S, L101H, K104R, K105A, F107M, E12S, and R65E. In some embodiments, the set of modifications comprises L10V, E12A, V18I, R65D, D87S, T88S, L101F, K104R, and K105T (see, for example, IL-13dn; SEQ ID NO:38). In some embodiments, the amino acid sequence is 90% identical. In some embodiments, the amino acid sequence is 95% identical. In some embodiments, the amino acid sequence is 98% identical. In some embodiments, the amino acid sequence is 99% identical. In some embodiments, the polypeptide comprising the one or more modifications is linked to an IL-2 or IL-2 mutein as described herein. In some embodiments, amino acid substitutions include without limitation those provided in FIG. 4. In some embodiments, the IL-2 mutein incudes any one of 5-1 SEQ ID NO:5, 5-2 SEQ ID NO:6, 6-6 SEQ ID NO:7, A2 SEQ ID NO:8, BT SEQ ID NO:9; B11 SEQ ID NO: 10; C5 SEQ ID NO: 11, D10 SEQ ID NO: 12, E10 SEQ ID NO: 13; G8 SEQ ID NO: 14; H4 SEQ ID NO: 15; and H9 SEQ ID NO: 16.

[0233] Table of IL-13 sequences is provided below.

TABLE 8
List of IL-13 Amino Acid Sequences

| SEQ ID NO: | |
|---|---|
| (Information) | Amino acid sequence |
| SEQ ID NO: 81 | PGPVPPSTALRELIEELVNITQNQKAPLCNGSMVW |
| (IL-13 wildtype) | SINLTAGMYCAALESLINVSGCSAIEKTQRMLSGF |
| | CPHKVSAGQFSSLHVRDTKIEVAQFVKDLLLHLKK |
| | LFREGQFN |
| SEQ ID NO: 82 | PGPVPPSTAVRALIEELINITQNQKAPLCNGSMVW |
| | SINRTAGMYCAALESLINVSGCSAIEKTQDMLSGF |
| | CPHKVSAGQFSSLHVRSSKIEVAQFVKDLLFHLRT |
| | LFREGQFN |
| SEQ ID NO: 83 | PGPVPPSTAIRELIEELINITQNQKAPLCNGSMVW |
| | SINLTAGMYCAALESLINVSGCSAIEKTQRMLSGF |
| | CPHKVSAGQFSSLHVRGSKIEVAQFVKDLLHHLRA |
| | LFREGQFN |
| SEQ ID NO: 84 | PGPVPPSTAVRELIEELINITQNQKAPLCNGSMVW |
| | SINRTAGMYCAALESLINVSGCSAIEKTQRMLSGF |
| | CPHKVSAGQFSSLHVRSSKIEVAQFVKDLLFHLRT |
| | LFREGQFN |
| SEQ ID NO: 85 | PGPVPPSTALIELIEELINITQNQKAPLCNGSMVW |
| | SINLTAGIYCAALESLINVSGCSAIEKTQRMLSGF |
| | CPHKVSAGQFSSLHVKGSKIEVAQFVKDLLHHLRA |
| | LMREGQFN |
| SEQ ID NO: 86 | PGPVPPSTAIRELIEELLNITQNQKAPLCNGSMVW |
| | SINLTAGMYCAALESLINVSGCSAIEKTQRMLSGF |
| | CPHKVSAGQFSSLHVMKSKIEVAQFVKDLLHHLRA |
| | LFREGQFN |
| SEQ ID NO: 87 | PGPVPPSTAIRELIEELINITQNQKAPLCNGSMVW |
| | SINLTAGMYCAALESLINVSGCSAIEKTQRMLSGF |
| | CPHKVSAGQFSSLHVRSSRIEVAQFVKDLLHHLRT |
| | LFREGQFN |
| SEQ ID NO: 88 | PGPVPPSTALRELIEELINITQNEKAPLCNGSMVW |
| | SINLTAGIYCAALESLINVSGCSAIEKTQRMLSGF |
| | CPHKVSAGQFSSLHVTGSKIEVAQFVKDLLYHLRA |
| | LFREGQFN |
| SEQ ID NO: 89 | PGPVPPSTALSELIEELINITQNQKAPLCNGSMVW |
| | SINPTAGMYCAALESLINVSGCSAIEKTQRMLSGF |
| | CPHKVAAGQFSSLHDKGSMIEVAQFVKDLLYHLRT |
| | LFREGQFN |
| SEQ ID NO: 90 | PGPVPPSTATRELIEELINITQNQKAPLCNGSMVW |
| | SINLTADMYCAALESLINVSGCSAIEKTQRMLSGF |
| | CPHKVSVGQFSSLHVRGSKIEVAQFVKDLLYHLRT |
| | LFREGQFN |
| SEQ ID NO: 91 | PGPVPPSTADIELIAELINITQNQKAPLCNGSMVW |
| | SINLTADMYCAALESLINVSGCSAIEKTQRMLSGF |
| | CPHKVSAGQFSSLHVKKTRIEVAQFVKDLLLHLKK |
| | LFKEGQFN |
| SEQ ID NO: 92 | PGPVPPSTAARELIEELVNITQNQKAPLCNGSMVW |
| | SINLTAGMYCAALESLINVSGCSAIEKTQRMLSGF |
| | CPHKVSAGQLSSLHVTGKRIEVAQFVKDLLNHLRA |
| | LFKEGQFN |
| SEQ ID NO: 93 | PGPVPPSTAVRELIEELVNITQNQKAPLCNGSMVW |
| | SINLTAGMYCAALESLINVSGCSAIEKTQRMLSGF |
| | CPHKVSAGQFSSLHVRDTRIEVAQFVKDLLNHLKE |
| | LFTEGQFN |
| SEQ ID NO: 94 | PGPVPPSTALSELMEELVNITQNQKAPLCNGSMVW |
| | SINLTAGMYCAALESLINVSGCSAIEKTQRMLSGF |
| | CPHKVSAGQFSSLHVRDSKIEVAQFVKDLLNHLKA |
| | LFKEGQFN |
| SEQ ID NO: 95 | GPVPPSTAFRELIEELVNITQNQKAPLCNGSMVWS |
| | INLTAGMYCAALESLINVSGCSAIEKTQRMLSGFC |
| | PHKVSPGQFSSLHVTNSRIEVAQFVKDLLNHLKAL |
| | FKEGQYN |
| SEQ ID NO: 96 | GPVPPSTAHLELIEELINITQNQKAPLCNGSMVWS |
| | INLTAGMYCAALESLINVSGCSAIEKTQRMLSGFC |
| | PHKVSAGQFSSLHVKETRIEVAQFVKDLLNHLKTL |
| | FKEGQFN |
| SEQ ID NO: 97 | PGPVPPSTAHLELIEELINITQNQKAPLCNGSMVW |
| | SINPTAGMYCAALESLINVSGCSAIEKTQRMLSGF |
| | CPHKVSAGQFSSLHVMDTRIEVAQFVKDLLLHLKK |
| | LFKEGQFN |
| SEQ ID NO: 98 | PGPVPPSTAHRELIEELVNITQNQKAPLCNGSMVW |
| | SINLTAGMYCAALESLINVSGCSAIEKTQRMLSGF |
| | CPHKVSAGQFSSLHVTGRKIEVAQFVKDLLLHLKK |
| | LFKEGQFN |
| SEQ ID NO: 99 | PGPVPPSTAHRELIEELVNITQNQKAPLCNGSMVW |
| | RINRTAGMYCAALESLINVSGCSAIEKTQRMLSGF |
| | CPHKVSAGQFSSLHVMDSRIEVAQFVKDLLNHLRA |
| | LFKEGQFN |
| SEQ ID NO: 100 | PGPVPPSTAARELIEELFNITQNQKAPLCNGSMVW |
| | SINLTAGMYCAALESLINVSGCSAIEKTKRMLSGF |
| | CPHKVSAGQFPSLHVKKTRIEVAQFVKDLLIHLRK |
| | LFKEGQFN |
| SEQ ID NO: 101 | PGPVPPSTALIELIEELINITQNQKAPLCNGSMVWS |
| (Exemplary sequence | INLTAGMYCAALESLINVSGCSAIEKTQRMLSGFCP |
| comprising R11I, V18I, R86K, | HKVSAGQFSSLHVKGSKIEVAQFVKDLLHHLRALMR |
| D87G, T88S, L101H, K104R, | EGQFN |
| K105A, F107M, referred to | |
| herein as A5) | |
| SEQ ID NO: 102 | PGPVPPSTAIRELIEELLNITQNQKAPLCNGSMVWS |
| (Exemplary sequence | INLTAGMYCAALESLINVSGCSAIEKTQRMLSGFCP |
| comprising L10I, V18L, R86M, | HKVSAGQFSSLHVMKSKIEVAQFVKDLLHHLRALFR |
| D87K, T88S, L101H, K104R, | EGQFN |
| K105A, referred to herein | |
| as A6) | |
| SEQ ID NO: 103 | PGPVPPSTAIRELIEELINITQNQKAPLCNGSMVWS |
| (Exemplary sequence | INLTAGMYCAALESLINVSGCSAIEKTQRMLSGFCP |
| comprising L10I, V18I, D87G, | HKVSAGQFSSLHVRGSKIEVAQFVKDLLHHLRALFR |
| T88S, L101H, K104R, K105A, | EGQFN |
| referred to herein as A7) | |
| SEQ ID NO: 104 | PGPVPPSTAIRELIEELINITQNQKAPLCNGSMVWS |
| (Exemplary sequence | INLTAGMYCAALESLINVSGCSAIEKTQRMLSGFCP |
| comprising L10I, V18I, D87S, | HKVSAGQFSSLHVRSSRIEVAQFVKDLLHHLRTLFR |
| T88S, K89R, L101H, K104R, | EGQFN |
| K105T; referred to herein | |
| as A8) | |
| SEQ ID NO: 105 | PGPVPPSTAVRELIEELINITQNQKAPLCNGSMVWS |
| (Exemplary sequence | IN [symbol] TAGMYCAALESLINVSGCSAIEKTQRMLSGFCP |
| comprising L10V, V18I, D87S, | HKVSAGQFSSLHVRSSKIEVAQFVKDLLFHLRTLFR |
| T88S, L101F, K104R, K105T, | EGQFN |
| referred to herein as A11 | |
| variant 1) | |
| SEQ ID NO: 105 | PGPVPPSTAVRELIEELINITQNQKAPLCNGSMVWS |
| (Exemplary sequence | IN [symbol] TAGMYCAALESLINVSGCSAIEKTQRMLSGFCP |
| comprising L10V, V18I, D87S, | HKVSAGQFSSLHVRSSKIEVAQFVKDLLFHLRTLFR |
| T88S, L101F, K104R, K105T, | EGQFN |
| referred to herein as A11 | |
| variant 2) | |
| SEQ ID NO: 106 | PGPVPPSTALRELIEELINITQNQKAPLCNGSMVW |
| (Exemplary sequence | SINLTAGMYCAALESLINVSGCSAIEKTQRMLSGF |
| comprising V18I, R86T, D87G, | CPHKVSAGQFSSLHVTGSKIEVAQFVKDLLYHLRA |
| T88S, L101Y, K104R, K105A, | LFREGQFN |
| referred to herein as B2) | |
| SEQ ID NO: 107 | PGPVPPSTALSELIEELINITQNQKAPLCNGSMVW |
| (Exemplary sequence | SINLTAGMYCAALESLINVSGCSAIEKTQRMLSGF |
| comprising R11S, V18I, R86K, | CPHKVSAGQFSSLHVKGSMIEVAQFVKDLLYHLRT |
| D87G, T88S, K89M, L101Y, | LFREGQFN |
| K104R, K105T, referred to | |
| herein as B4) | |
| SEQ ID NO: 108 | PGPVPPSTATRELIEELINITQNQKAPLCNGSMVW |
| (Exemplary sequence | SINLTAGMYCAALESLINVSGCSAIEKTQRMLSGF |
| comprising L10T, V18I, D87G, | CPHKVSAGQFSSLHVRGSKIEVAQFVKDLLYHLRT |
| T88S, K89K, L10Y1, K104R, | LFREGQFN |
| K105T, referred to herein as B6) | |
| SEQ ID NO: 109 | PGPVPPSTADIELIEELINITQNQKAPLCNGSMVW |
| (Exemplary sequence | SINLTAGMYCAALESLINVSGCSAIEKTQRMLSGF |
| comprising L10D, R11I, V18I, | CPHKVSAGQFSSLHVKKTRIEVAQFVKDLLLHLKK |
| R86K, D87K, K89R, R108K, | LFKEGQFN |
| referred to herein as C2) | |
| SEQ ID NO: 110 | PGPVPPSTAARELIEELVNITQNQKAPLCNGSMVW |
| (Exemplary sequence | SINLTAGMYCAALESLINVSGCSAIEKTQRMLSGF |
| comprising L10A, R86T, D87G, | CPHKVSAGQFSSLHVTGKRIEVAQFVKDLLNHLRA |
| T88K, K89R, L101N, K104R, | LFKEGQFN |
| K105A, R108K, referred to | |
| herein as C3) | |
| SEQ ID NO: 111 | PGPVPPSTAVRELIEELVNITQNQKAPLCNGSMVW |
| (Exemplary sequence | SINLTAGMYCAALESLINVSGCSAIEKTQRMLSGF |
| comprising L10V, K89R, L101N, | CPHKVSAGQFSSLHVRDTRIEVAQFVKDLLNHLKE |
| K105E, R108T, referred to | LFTEGQFN |
| herein as C4) | |
| SEQ ID NO: 112 | PGPVPPSTALSELMEELVNITQNQKAPLCNGSMVW |
| (Exemplary sequence | SINLTAGMYCAALESLINVSGCSAIEKTQRMLSGF |
| comprising R11S, I14M, T88S, | CPHKVSAGQFSSLHVRDSKIEVAQFVKDLLNHLKA |
| L101N, K105A, R108K, referred | LFKEGQFN |
| to herein as C7) | |
| SEQ ID NO: 113 | PGPVPPSTAHLELIEELINITQNQKAPLCNGSMVW |
| (Exemplary sequence | SINLTAGMYCAALESLINVSGCSAIEKTQRMLSGF |
| comprising L10H, R11L, V18I, | CPHKVSAGQFSSLHVKETRIEVAQFVKDLLNHLKT |
| R86K, D87E, K89R, L101N, | LFKEGQFN |
| K105T, R108K, refered to herein | |
| as C9) | |
| SEQ ID NO: 114 | PGPVPPSTAHLELIEELINITQNQKAPLCNGSMVW |
| (Exemplary sequence | SINLTAGMYCAALESLINVSGCSAIEKTQRMLSGF |
| comprising L10H, R11L, V18I, | CPHKVSAGQFSSLHVMDTRIEVAQFVKDLLLHLKK |
| R86M, K89R, R108K, referred to | LFKEGQFN |
| herein as C10) | |
| SEQ ID NO: 115 | PGPVPPSTAHRELIEELVNITQNQKAPLCNGSMVW |
| (Exemplary sequence | SINLTAGMYCAALESLINVSGCSAIEKTQRMLSGF |
| comprising L10H, R86T, D87G, | CPHKVSAGQFSSLHVTGRKIEVAQFVKDLLLHLKK |
| T88R, R108K, referred to herein | LFKEGQFN |
| as C11) | |
| SEQ ID NO: 116 | PGPVPPSTAHRELIEELVNITQNQKAPLCNGSMVW |
| (Exemplary sequence | SINLTAGMYCAALESLINVSGCSAIEKTQRMLSGF |
| comprising L10H, R86M, T88S, | CPHKVSAGQFSSLHVMDSRIEVAQFVKDLLNHLRA |
| K89R, L101N, K104R, K105A, | LFKEGQFN |
| R108K, referred to herein as | |
| C12) | |
| SEQ ID NO: 117 | PGPVPPSTAARELIEELFNITQNQKAPLCNGSMVW |
| (Exemplary sequence | SINLTAGMYCAALESLINVSGCSAIEKTQRMLSGF |
| comprising L10A, V18F, R86F, | CPHKVSAGQFSSLHVKKTRIEVAQFVKDLLIHLRK |
| D87F, K89R, L101I, K104R, | LFKEGQFN |
| R108K, referred to herein as D7) | |
| SEQ ID NO: 118 | PGPVPPSTAVRALIEELINITQNQKAPLCNGSMVW |
| (Exemplary sequence | SINLTAGMYCAALESLINVSGCSAIEKTQDMLSGF |
| comprising L10V, E12A, V18I, | CPHKVSAGQFSSLHVRSSKIEVAQFVKDLLFHLRT |
| R65D, D87S, T88S, L101F, | LFREGQFN |
| K104R, K105T, referred to | |
| herein as IL-13dn) | |
| SEQ ID NO: 119 | MHPLLNPLLLALGLMALLLTTVIALTCLGGFASPG |
| **signal peptide** | PVPPSTAHRELIEELVNITQNQKAPLCNGSMVWSI |
| | NLTAGMYCAALESLINVSGCSAIEKTQRMLSGFCP |
| | HKVSAGQFSSLHVTGRKIEVAQFVKDLLLHLKKLF |
| | KEGQFN |
| SEQ ID NO: 120 | PGPVPPSTAVRALIEELINITQNQKAPLCNGSMVW |
| (Exemplary sequence | SIN [symbol] TAGMYCAALESLINVSGCSAIEKTQDMLSGF |
| comprising L10V, E12A, V18I, | CPHKVSAGQFSSLHVRSSKIEVAQFVKDLLFHLRT |
| R65D, D87S, T88S, L101F, | LFREGQFN |
| K104R, K105T, referred to | |
| herein as IL-13DN variant 1) | |
| SEQ ID NO: 121 | PGPVPPSTAVRALIEELINITQNQKAPLCNGSMVW |
| (Exemplary sequence | SIN [symbol] TAGMYCAALESLINVSGCSAIEKTQDMLSGF |
| comprising L10V, E12A, V18I, | CPHKVSAGQFSSLHVRSSKIEVAQFVKDLLFHLRT |
| R65D, D87S, T88S, L101F, | LFREGQFN |
| K104R, K105T, referred to | |
| herein as IL-13DN variant 2) | |
| SEQ ID NO: 122 | MPGPVPPSTALRELIEELVNITQNQKAPLCNGSMV |
| wild-type IL-13 including an | WSINLTAGMYCAALESLINVSGCSAIEKTQRMLSG |
| additional methionine at the N- | FCPHKVSAGQFSSLHVRDTKIEVAQFVKDLLLHLK |
| terminus | KLFREGQFN |
| SEQ ID NO: 123 | MYCAALESLINVSGCSAIEKTQRMLSGFCPHKVSA |
| circularly permuted IL-13 | GQFSSLHVRDTKIEVAQFVKDLLLHLKKLFREGQF |
| | NGGSGPGPVPPSTALRELIEELVNITQNQKAPLCN |
| | GSMVWSINLTAG |
| SEQ ID NO: 124 | MYCAALESLINVSGCSAIEKTQRMLSGFCPHKVSA |
| Circularly permuted IL-13 | GQFSSLHVRDTKIEVAQFVKDLLLHLKKLFREGQF |
| | NGGSGMPGPVPPSTALRELIEELVNITQNQKAPLC |
| | NGSMVWSINLTAG |
| SEQ ID NO: 125 | MYCAALESLINVSGCSAIEKTQRMLSGFCPHKVSA |
| circularly permuted IL-13 ″A11″ | GQFSSLHVRSSKIEVAQFVKDLLFHLRTLFREGQF |
| variant | NGGSGPGPVPPSTAVRELIEELINITQNQKAPLCN |
| | GSMVWSINRTAG |
| SEQ ID NO: 126 | MYCAALESLINVSGCSAIEKTQRMLSGFCPHKVSA |
| circularly permuted IL-13 | GQFSSLHVRSSKIEVAQFVKDLLFHLRTLFREGQF |
| | NGGSGMPGPVPPSTAVRELIEELINITQNQKAPLC |
| | NGSMVWSINRTAG |
| SEQ ID NO: 127 | MYCAALESLINVSGCSAIEKTQDMLSGFCPHKVSA |
| circularly permuted IL-13 ″DN″ | GQFSSLHVRSSKIEVAQFVKDLLFHLRTLFREGQF |
| variant | NGGSGPGPVPPSTAVRALIEELINITQNQKAPLCN |
| | GSMVWSINLTAG |
| SEQ ID NO: 128 | MYCAALESLINVSGCSAIEKTQDMLSGFCPHKVSA |
| circular permuted IL-13 | GQFSSLHVRSSKIEVAQFVKDLLFHLRTLFREGQF |
| | NGGSGMPGPVPPSTAVRALIEELINITQNQKAPLC |
| | NGSMVWSINLTAG |

[0234] Any IL-4 sequence or variant thereof can be used in a fusion with an IL-2 mutein or variant, including those as described herein. In some embodiments, the IL-2 mutein incudes any one of 5-1 SEQ ID NO:5; 5-2 SEQ ID NO:6; 6-6 SEQ ID NO:7; A2 SEQ ID NO:8; B1 SEQ ID NO:9; B11 SEQ ID NO:10; C5 SEQ ID NO: 11; D10 SEQ ID NO:12; E10 SEQ ID NO:13; G8 SEQ ID NO: 14; H4 SEQ ID NO:15; and H9 SEQ ID NO:16. Exemplary polypeptide sequences are provided in SEQ ID NO:130-SEQ ID NO:135, including any of those provided herein. In some embodiments, the IL-4 polypeptide sequence is as provided in any one of SEQ ID NO:130 through SEQ ID NO:135. In some embodiments, the IL-4 polypeptide sequence is SEQ ID NO:130. In some embodiments, the IL-4 polypeptide sequence is SEQ ID NO:131. In some embodiments, the IL-4 polypeptide sequence is SEQ ID NO:132. In some embodiments, the IL-4 polypeptide sequence is SEQ ID NO:133. In some embodiments, the IL-4 polypeptide sequence is SEQ ID NO:134. In some embodiments, the IL-4 polypeptide sequence is SEQ ID NO:135. In some embodiments, the IL-4 polypeptide sequence is 98% identical to any one of SEQ ID NO: 130 through SEQ ID NO:135. In some embodiments, the IL-4 polypeptide sequence is 99% identical to any one of SEQ ID NO:130 through SEQ ID NO: 135. In some embodiments, any one of SEQ ID NO:130-SEQ ID NO:135 are linked to an IL-2 or IL-2 mutein as described herein. In some embodiments, SEQ ID NO:130 is linked to an IL-2 or IL-2 mutein as described herein. In some embodiments, SEQ ID NO:131 is linked to an IL-2 or IL-2 mutein as described herein. In some embodiments, SEQ ID NO:132 is linked to an IL-2 or IL-2 mutein as described herein. In some embodiments, SEQ ID NO:133 is linked to an IL-2 or IL-2 mutein as described herein. In some embodiments, SEQ ID NO:134 is linked to an IL-2 or IL-2 mutein as described herein. In some embodiments, SEQ ID NO:135 is linked to an IL-2 or IL-2 mutein as described herein. In some embodiments, the IL-2 mutein incudes any one of 5-1 SEQ ID NO:5; 5-2 SEQ ID NO:6; 6-6 SEQ ID NO:7; A2 SEQ ID NO:8; B1 SEQ ID NO:9; B11 SEQ ID NO: 10; C5 SEQ ID NO:11; D10 SEQ ID NO: 12; E10 SEQ ID NO:13; G8 SEQ ID NO:14; H4 SEQ ID NO: 15; and H9 SEQ ID NO:16.

[0235] Table of IL-4 sequences is provided below.

TABLE 9
List of IL-4 Amino Acid Sequences

| SEQ ID NO: | |
|---|---|
| (Information) | Amino acid sequence |
| SEQ ID NO: 129 | MGLTSQLLPPLFFLLACAGNFVHGHKCDITLQEII |
| (IL-4 wildtype with signal | KTLNSLTEQKTLCTELTVTDIFAASKNTTEKETFC |
| peptide) | RAATVLRQFYSHHEKDTRCLGATAQQFHRHKQLIR |
| | FLKRLDRNLWGLAGLNSCPVKEANQSTLENFLERL |
| | KTIMREKYSKCSS |
| SEQ ID NO: 130 | MHKCDITLQEIIKTLNSLTEQKTLCTELTVTDIFA |
| IL-4 including an additional | ASKDTTEKETFCRAATVLRQFYSHHEKDTRCLGAT |
| methionine at the N-terminus″ | AQQFHRHKQLIRFLKRLDRNLWGLAGLNSCPVKEA |
| starting | NQSTLENFLERLKTIMREKYSKCSS |
| SEQ ID NO: 131 | KCDITLQEIIKTLNSLTEQKTLCTELTVTDIFAAS |
| KFR | KNTTEKETFCRAATVLRQFYSHHEKDTRCLGATAQ |
| | QFHRHKQLIRFLKRLDRNLWGLAGLNSCPVKEANQ |
| | STLENFLERLKTIMKEKFRKCSS |
| SEQ ID NO: 132 | MDTTEKETFCRAATVLRQFYSHHEKDTRCLGATAQ |
| RGA | QFHRHKQLIRFLKRLDRNLWGLAGLNSCPVKEANQ |
| | STLENFLERLRVIMQSKWFKCGAGGNGGHKCDITL |
| | QEIIKTLNSLTEQKTLCTELTVTDIFAAS |
| SEQ ID NO: 133 | MDTTEKETFCRAATVLRQFYSHHEKDTRCLGATAQ |
| cirularly permuted wild-type IL-4 | QFHRHKQLIRFLKRLDRNLWGLAGLNSCPVKEANQ |
| | STLENFLERLKTIMREKYSKCSSGGNGGHKCDITL |
| | QEIIKTLNSLTEQKTLCTELTVTDIFAAS |
| SEQ ID NO: 134 | MDTTEKETFCRAATVLRQFYSHHEKDTRCLGATAQ |
| circularly permuted ″KFR″ IL-4 | QFHRHKQLIRFLKRLDRNLWGLAGLNSCPVKEANQ |
| variant | STLENFLERLKTIMKEKFRKCSSGGNGGHKCDITL |
| | QEIIKTLNSLTEQKTLCTELTVTDIFAASRQFYSH |
| | HEKDTRCLGATAQQFHRHKQLIRFLKRLDRNLWGL |
| | AGLNSCPVKEANQSTLENFLERLRVIMQSKWFKCG |
| | AGGNGGHKCDITLQEIIKTLNSLTEQKTLCTELTV |
| | TDIFAAS |
| SEQ ID NO: 135 | MDTTEKETFCRAATVLRQFYSHHEKDTRCLGATAQ |
| circularly permuted ″KF″ IL-4 | QFHRHKQLIRFLKRLDRNLWGLAGLNSCPVKEANQ |
| variant | STLENFLERLKTIMKEKFKCSSGGNGGHKCDITLQ |
| | EIIKTLNSLTEQKTLCTELTVTDIFAAS |

[0236] In some embodiments, an IL-2 mutein can be fused to an IL-10, IL-12, IL-15, and/or IL-18 sequence. In some embodiments, such fusions function to specifically target the fusion construct to NK cells and/or CD8⁺ cells. In some embodiments, the IL-2 mutein incudes any one of 5-1 SEQ ID NO:5; 5-2 SEQ ID NO:6; 6-6 SEQ ID NO:7; A2 SEQ ID NO:8, BT SEQ ID NO:9; BT 1 SEQ ID NO:10; C5 SEQ ID NO:11; D10 SEQ ID NO:12; ET SEQ ID NO:13; G8 SEQ ID NO:14; H4 SEQ ID NO: 15 and H9 SEQ ID NO 16 In some embodiments, SEQ ID NO 136 is linked to an IL-2 or IL-2 mutein as described herein. In some embodiments, SEQ ID NO: 137 is linked to an IL-2 or IL-2 mutein as described herein. In some embodiments, SEQ ID NO: 138 is linked to an IL-2 or IL-2 mutein as described herein. In some embodiments, SEQ ID NO: 139 is linked to an IL-2 or IL-2 mutein as described herein. In some embodiments, SEQ ID NO: 140 is linked to an IL-2 or IL-2 mutein as described herein. In some embodiments, SEQ ID NO: 141 is linked to an IL-2 or IL-2 mutein as described herein. In some embodiments, the IL-2 mutein can be fused to an IL-IL-10, IL-12, IL-15, and/or IL-18 sequence as provided in the table below, in SEQ ID NOs: 136-141.

TABLE 10
Exemplary IL-10, IL-12, IL-15, and/or IL-18 Sequences

| SEQ ID NO: | Amino Acid Sequence |
|---|---|
| SEQ ID NO: 136 | MHSSALLCCLVLLTGVRASPGQGTQSENSCTHFPGNLPNMLRDLRDAFS |
| IL-10 | RVKTFFQMKDQLDNLLLKESLLEDFKGYLGCQALSEMIQFYLEEVMPQA |
| (Uniprot sp\|P22301\|) | ENQDPDIKAHVNSLGENLKTLRLRLRRCHRFLPCENKSKAVEQVKNAFN |
| | KLQEKGIYKAMSEFDIFINYIEAYMTMKIRN |
| SEQ ID NO: 137 | MCPARSLLLVATLVLLDHLSLARNLPVATPDPGMFPCLHHSQNLLRAVS |
| IL-12A | NMLQKARQTLEFYPCTSEEIDHEDITKDKTSTVEACLPLELTKNESCLN |
| (Uniprot sp\|P29459\|) | SRETSFITNGSCLASRKTSFMMALCLSSIYEDLKMYQVEFKTMNAKLLM |
| | DPKRQIFLDQNMLAVIDELMQALNFNSETVPQKSSLEEPDFYKTKIKLC |
| | ILLHAFRIRAVTIDRVMSYLNAS |
| SEQ ID NO: 138 | MCHQQLVISWFSLVFLASPLVAIWELKKDVYVVELDWYPDAPGEMVVLT |
| IL-12B | CDTPEEDGITWTLDQSSEVLGSGKTLTIQVKEFGDAGQYTCHKGGEVLS |
| (Uniprot sp\|P29460) | HSLLLLHKKEDGIWSTDILKDQKEPKNKTFLRCEAKNYSGRFTCWWLTT |
| | ISTDLTFSVKSSRGSSDPQGVTCGAATLSAERVRGDNKEYEYSVECQED |
| | SACPAAEESLPIEVMVDAVHKLKYENYTSSFFIRDIIKPDPPKNLQLKP |
| | LKNSRQVEVSWEYPDTWSTPHSYFSLTFCVQVQGKSKREKKDRVFTDKT |
| | SATVICRKNASISVRAQDRYYSSSWSEWASVPCS |
| SEQ ID NO: 139 | MRISKPHLRSISIQCYLCLLLNSHFLTEAGIHVFILGCFSAGLPKTEAN |
| IL-15 | WVNVISDLKKIEDLIQSMHIDATLYTESDVHPSCKVTAMKCFLLELQVI |
| (Uniprot sp\|P40933\|) | SLESGDASIHDTVENLIILANNSLSSNGNVTESGCKECEELEEKNIKEF |
| | LQSFVHIVQMFINTS |
| SEQ ID NO: 140 | MAAEPVEDNCINFVAMKFIDNTLYFIAEDDENLESDYFGKLESKLSVIR |
| IL-18 | NLNDQVLFIDQGNRPLFEDMTDSDCRDNAPRTIFIISMYKDSQPRGMAV |
| (Uniprot | TISVKCEKISTLSCENKIISFKEMNPPDNIKDTKSDIIFFQRSVPGHDN |
| sp\|Q14116\|) | KMQFESSSYEGYFLACEKERDLFKLILKKEDELGDRSIMFTVQNED |
| SEQ ID NO: 141 | YFGKLESKLSVIRNLNDQVLFIDQGNRPLFEDMTDSDCRDNAPRTIFII |
| IL-18 | SMYKDSQPRGMAVTISVKCEKISTLSCENKIISFKEMNPPDNIKDTKSD |
| (mature) | IIFFQRSVPGHDNKMQFESSSYEGYFLACEKERDLFKLILKKEDELGDR |
| | SIMFTVQNED |

[0237] The sequences of exemplary IL-2 mutein incudes any one of 5-1 SEQ ID NO:5; 5-2 SEQ ID NO:6; 6-6 SEQ ID NO:7, A2 SEQ ID NO:8, BT SEQ ID NO:9; BT 1 SEQ ID NO: 10, C5 SEQ ID NO: 11, D10 SEQ ID NO: 12, E10 SEQ ID NO: 13, G8 SEQ ID NO: 14; H4 SEQ ID NO: 15; and H9 SEQ ID NO: 16.

[0238] In some embodiments, the cytokine-cytokine fusion is one of those included in the table below.

TABLE 11
List of Exemplary IL-2 Fusion Amino Acid Sequences

| SEQ ID NO: | |
|---|---|
| (Information) | Amino acid sequence |
| SEQ ID NO: 142 | PGPVPPSTAVRALIEELINITQNQKAPLCNGSMVWSINRTAGMY |
| IL-13 variant-H9 (linker in | CAALESLINVSGCSAIEKTQDMLSGFCPHKVSAGQFSSLHVRSS |
| bold and underlined) | KIEVAQFVKDLLFHLRTLFREGQFNGGGGSGGGGSGGGGSAPTS |
| | SSTKKTQLQLEHLLLDLQMILNGINNYKNPKLTRMLTFKFYMPK |
| | KATELKHLQCLEEELKPLEEVLNLAQSKNFHFDPRDVVSNINVF |
| | VLELKGSETTFMCEYADETATIVEFLNRWITFCQSIISTLT |
| SEQ ID NO: 143 | PGPVPPSTAHRELIEELVNITQNQKAPLCNGSMVWSINLTAGMY |
| IL-13 variant-H9 (linker in | CAALESLINVSGCSAIEKTQRMLSGFCPHKVSAGQFSSLHVTGR |
| bold and underlined) | KIEVAQFVKDLLLHLKKLFKEGQFNGGGGSGGGGSGGGGSAPTS |
| | SSTKKTQLQLEHLLLDLQMILNGINNYKNPKLTRMLTFKFYMPK |
| | KATELKHLQCLEEELKPLEEVLNLAQSKNFHFDPRDVVSNINVF |
| | VLELKGSETTFMCEYADETATIVEFLNRWITFCQSIISTLT |
| SEQ ID NO: 144 | APTSSSTKKTQLQLEHLLLDLQMILNGINNYKNPKLTRMLTFKF |
| H9-IL-12 (linker in bold and | YMPKKATELKHLQCLEEELKPLEEVLNLAQSKNFHFDPRDVVSN |
| underlined) | INVFVLELKGSETTFMCEYADETATIVEFLNRWITFCQSIISTL |
| | TGGGGSGGGGSGGGGSRNLPVATPDPGMFPCLHHSQNLLRAVSN |
| | MLQKARQTLEFYPCTSEEIDHEDITKDKTSTVEACLPLELTKNE |
| | SCLNSRETSFITNGSCLASRKTSFMMALCLSSIYEDLKMYQVEF |
| | KTMNAKLLMDPKRQIFLDQNMLAVIDELMQALNFNSETVPQKSS |
| | LEEPDFYKTKIKLCILLHAFRIRAVTIDRVMSYLNASIWELKKD |
| | VYVVELDWYPDAPGEMVVLTCDTPEEDGITWTLDQSSEVLGSGK |
| | TLTIQVKEFGDAGQYTCHKGGEVLSHSLLLLHKKEDGIWSTDIL |
| | KDQKEPKNKTFLRCEAKNYSGRFTCWWLTTISTDLTFSVKSSRG |
| | SSDPQGVTCGAATLSAERVRGDNKEYEYSVECQEDSACPAAEES |
| | LPIEVMVDAVHKLKYENYTSSFFIRDIIKPDPPKNLQLKPLKNS |
| | RQVEVSWEYPDTWSTPHSYFSLTFCVQVQGKSKREKKDRVFTDK |
| | TSATVICRKNASISVRAQDRYYSSSWSEWASVPCS |
| SEQ ID NO: 145 | APTSSSTKKTQLQLEHLLLDLQMILNGINNYKNPKLTRMLTFKF |
| H9-IL-18 (linker in bold and | YMPKKATELKHLQCLEEELKPLEEVLNLAQSKNFHFDPRDVVSN |
| underlined) | INVFVLELKGSETTFMCEYADETATIVEFLNRWITFCQSIISTL |
| | TGGGGSGGGGSGGGGSYFGKLESKLSVIRNLNDQVLFIDQGNRP |
| | LFEDMTDSDCRDNAPRTIFIISMYKDSQPRGMAVTISVKCEKIS |
| | TLSCENKIISFKEMNPPDNIKDTKSDIIFFQRSVPGHDNKMQFE |
| | SSSYEGYFLACEKERDLFKLILKKEDELGDRSIMFTVQNED |
| SEQ ID NOs: 148 and 213 | Gene1: |
| KIH MDNA132-Fc-MDNA109 | PGPVPPSTAHRELIEELVNITQNQKAPLCNGSMVWSINLTA |
| (1:1:1:) | GMYCAALESLINVSGCSAIEKTQRMLSGFCPHKVSAGQFS |
| Fc heteroduplex with MW of | SLHVTGRKIEVAQFVKDLLLHLKKLFKEGQFNGGGGSGGG |
| 80.8 KDa | GSGGGGSDKTHTCPPCPAPELLGGPSVFLFPPKPKDTLMI |
| | SRTPEVTCVVVDVSHEDPEVKFNWYVDGVEVHNAKTKPR |
| | EEQYASTYRWVSVLTVLHQDWLNGKEYKCKVSNKALPAPI |
| | EKTISKAKGQPREPQVYTLPPCREEMTKNQVSLWCLVKG |
| | FYPSDIAVEWESNGQPENNYKTTPPVLDSDGSFFLYSKLT |
| | VDKSRWQQGNVFSCSVMHEALHNHYTQKSLSLSPGGGG |
| | SGGGGGSGGGGSGGGGSAPTSSSTKKTQLQLEHLLLDL |
| | QMILNGINNYKNPKLTRMLTAKFYMPKKATELKHLQCLEEA |
| | LKPLEEVLNLAQSKNFHFDPRDVVSNINVFVLELKGSETTF |
| | [sequence omitted] (SEQ ID NO: |
| | 148) |
| | Gene2: |
| | DKTHTCPPCPAPELLGGPSVFLFPPKPKDTLMISRTPEVTC |
| | VVVDVSHEDPEVKFNWYVDGVEVHNAKTKPREEQYASTY |
| | RVVSVLTVLHQDWLNGKEYKCKVSNKALPAPIEKTISKAK |
| | GQPREPQVCTLPPSREEMTKNQVSLSCAVKGFYPSDIAV |
| | EWESNGQPENNYKTTPPVLDSDGSFFLVSKLTVDKSRWQ |
| | QGNVFSCSVMHEALHNHYTQKSLSLSPGK (SEQ ID NO: |
| | 213) |
| SEQ ID NOs: 149 and 213 | Gene1: |
| MDNA413-Fc-MDNA109 (KIH) | PGPVPPSTAVRALIEELINITQNQKAPLCNGSMVWSINRTA |
| Fc heteroduplex with MW of | GMYCAALESLINVSGCSAIEKTQDMLSGFCPHKVSAGQFS |
| 80.8 KDa | SLHVRSSKIEVAQFVKDLLFHLRTLFREGQFNGGGGSGG |
| | GGSGGGGSDKTHTCPPCPAPELLGGPSVFLFPPKPKDTL |
| | MISRTPEVTCVVVDVSHEDPEVKFNWYVDGVEVHNAKTK |
| | PREEQYASTYRWVSVLTVLHQDWLNGKEYKCKVSNKALP |
| | APIEKTISKAKGQPREPQVYTLPPCREEMTKNQVSLWCLV |
| | KGFYPSDIAVEWESNGQPENNYKTTPPVLDSDGSFFLYSK |
| | LTVDKSRWQQGNVFSCSVMHEALHNHYTQKSLSLSPGG |
| | GGSGGGGGSGGGGSGGGGSAPTSSSTKKTQLQLEHLLL |
| | DLQMILNGINNYKNPKLTRMLTFKFYMPKKATELKHLQCLE |
| | EELKPLEEVLNLAQSKNFHFDPRDVVSNINVFVLELKGSET |
| | TFMCEYADETATIVEFLNRWITFCQSIISTLT (SEQ ID NO: |
| | 149) |
| | Gene2 |
| | DKTHTCPPCPAPELLGGPSVFLFPPKPKDTLMISRTPEVTC |
| | VVVDVSHEDPEVKFNWYVDGVEVHNAKTKPREEQYASTY |
| | RVVSVLTVLHQDWLNGKEYKCKVSNKALPAPIEKTISKAK |
| | GQPREPQVCTLPPSREEMTKNQVSLSCAVKGFYPSDIAV |
| | EWESNGQPENNYKTTPPVLDSDGSFFLVSKLTVDKSRWQ |
| | QGNVFSCSVMHEALHNHYTQKSLSLSPGK (SEQ ID NO: |
| | 213) |
| SEQ ID NO: 150 | APTSSSTKKTQLQLEHLLLDLQMILNGINNYKNPKLTRMLT |
| MDNA109FEAA-Fc-MDNA413 | AKFYMPKKATELKHLQCLEEALKPLEEVLNLAQSKNFHFD |
| Fc homodimer with MW of | PRDVVSNINVFVLELKGSETTFMCEYADETATIVEFLNRWI |
| 109.8 KDa | TFCQSIISTLTGGGGSGGGGSGGGGSDKTHTCPPCPAPE |
| | LLGGPSVFLFPPKPKDTLMISRTPEVTCVVVDVSHEDPEV |
| | KFNWYVDGVEVHNAKTKPREEQYASTYRVVSVLAPTSSS |
| | TKKTQLQLEHLLLDLQMILNGINNYKNPKLTRMLTAKFYMP |
| | KKATELKHLQCLEEALKPLEEVLNLAQSKNFHFDPRDWVS |
| | NINVFVLELKGSETTFMCEYADETATIVEFLNRWITFCQSII |
| | STLTGGGGSGGGGSGGGGSDKTHTCPPCPAPELLGGPS |
| | VFLFPPKPKDTLMISRTPEVTCVVVDVSHEDPEVKFNWYV |
| | DGVEVHNAKTKPREEQYASTYRVVSVLTVLHQDWLNGKE |
| | YKCKVSNKALPAPIEKTISKAKGQPREPQVYTLPPSREEMT |
| | KNQVSLTCLVKGFYPSDIAVEWESNGQPENNYKTTPPVLD |
| | SDGSFFLYSKLTVDKSRWQQGNVFSCSVMHEALHNHYTQ |
| | KSLSLSPGGGGGSGGGGSGGGGSPGPVPPSTAVRALIEE |
| | LINITQNQKAPLCNGSMVWSINRTAGMYCAALESLINVSGC |
| | SAIEKTQDMLSGFCPHKVSAGQFSSLHVRSSKIEVAQFVK |
| | DLLFHLRTLFREGQFN |

[0239] In some embodiments, the cytokine-cytokine fusion is one of those included in the table below (see Table 12, as well as FIG. 54).

TABLE 12
List of Bispecific Fusion Constructs

| Specific | |
|---|---|
| Construct | Gene sequence |
| SEQ ID NOS: 151 | Gene 1: |
| and 214 | DKTHTCPPCPAPELLGGPSVFLFPPKPKDTLMISRTPEVTCVVVDVSHEDPEVKFNWY |
| Fc-MDNA132 (1:1 | VDGVEVHNAKTKPREEQYASTYRVVSVLTVLHQDWLNGKEYKCKVSNKALPAPIEKTI |
| KIH) | SKAKGQPREPQVYTLPPCRDELTKNQVSLWCLVKGFYPSDIAVEWESNGQPENNYKT |
| | TPPVLDSDGSFFLYSKLTVDKSRWQQGNVFSCSVMHEALHNHYTQKSLSLSPGGGG |
| | GSGGGGSGGGGSPGPVPPSTAHRELIEELVNITQNQKAPLCNGSMVWSINLTAGMYC |
| | AALESLINVSGCSAIEKTORMLSGFCPHKVSAGQFSSLHVTGRKIEVAQFVKDLLLHLK |
| | KLFKEGQFN (SEQ ID NO: 151) |
| | Gene 2: |
| | DKTHTCPPCPAPELLGGPSVFLFPPKPKDTLMISRTPEVTCVVVDVSHEDPEVKFNWY |
| | VDGVEVHNAKTKPREEQYASTYRVVSVLTVLHQDWLNGKEYKCKVSNKALPAPIEKTI |
| | SKAKGQPREPQVCTLPPSRDELTKNQVSLSCAVKGFYPSDIAVEWESNGQPENNYKT |
| | TPPVLDSDGSFFLVSKLTVDKSRWQQGNVFSCSVMHEALHNHYTQKSLSLSPG (SEQ ID |
| | NO: 214) |
| SEQ ID NO: 152 | Gene 1 and Gene 2: |
| Fc-A11 (1:2) | DKTHTCPPCPAPELLGGPSVFLFPPKPKDTLMISRTPEVTCVVVDVSHEDPEVKFNWY |
| version 1 | VDGVEVHNAKTKPREEQYASTYRVVSVLTVLHQDWLNGKEYKCKVSNKALPAPIEKTI |
| | SKAKGQPREPQVYTLPPSRDELTKNQVSLTCLVKGFYPSDIAVEWESNGQPENNYKT |
| | TPPVLDSDGSFFLYSKLTVDKSRWQQGNVFSCSVMHEALHNHYTQKSLSLSPGGGG |
| | GSGGGGSGGGGSPGPVPPSTAVRELIEELINITQNQKAPLCNGSMVWSINRTAGMYC |
| | AALESLINVSGCSAIEKTQRMLSGFCPHKVSAGQFSSLHVRSSKIEVAQFVKDLLFHLR |
| | TLFREGQFN |
| SEQ ID NO: 153 | Gene 1 and Gene 2: |
| Fc-A11 (1:2) | DKTHTCPPCPAPELLGGPSVFLFPPKPKDTLMISRTPEVTCVVVDVSHEDPEVKFNWY |
| version 2 | VDGVEVHNAKTKPREEQYASTYRVVSVLTVLHQDWLNGKEYKCKVSNKALPAPIEKTI |
| | SKAKGQPREPQVYTLPPSRDELTKNQVSLTCLVKGFYPSDIAVEWESNGQPENNYKT |
| | TPPVLDSDGSFFLYSKLTVDKSRWQQGNVFSCSVMHEALHNHYTQKSLSLSPGGGG |
| | GSGGGGSGGGGSPGPVPPSTAVRELIEELINITQNQKAPLCNGSMVWSINLTAGMYC |
| | AALESLINVSGCSAIEKTQRMLSGFCPHKVSAGQFSSLHVRSSKIEVAQFVKDLLFHLR |
| | TLFREGQFN |
| SEQ ID NO: 154 | Gene 1 and Gene 2: |
| Fc-MDNA413 | DKTHTCPPCPAPELLGGPSVFLFPPKPKDTLMISRTPEVTCVVVDVSHEDPEVKFNWY |
| (1:2) | VDGVEVHNAKTKPREEQYASTYRVVSVLTVLHQDWLNGKEYKCKVSNKALPAPIEKTI |
| version 1 | SKAKGQPREPQVYTLPPSRDELTKNQVSLTCLVKGFYPSDIAVEWESNGQPENNYKT |
| | TPPVLDSDGSFFLYSKLTVDKSRWQQGNVFSCSVMHEALHNHYTQKSLSLSPGGGG |
| | GSGGGGSGGGGSPGPVPPSTAVRALIEELINITQNQKAPLCNGSMVWSINRTAGMYC |
| | AALESLINVSGCSAIEKTQDMLSGFCPHKVSAGQFSSLHVRSSKIEVAQFVKDLLFHLR |
| | TLFREGQFN |
| SEQ ID NO: 155 | Gene 1 and Gene 2: |
| Fc-MDNA413 | DKTHTCPPCPAPELLGGPSVFLFPPKPKDTLMISRTPEVTCVVVDVSHEDPEVKFNWY |
| (1:2) | VDGVEVHNAKTKPREEQYASTYRVVSVLTVLHQDWLNGKEYKCKVSNKALPAPIEKTI |
| version 2 | SKAKGQPREPQVYTLPPSRDELTKNQVSLTCLVKGFYPSDIAVEWESNGQPENNYKT |
| | TPPVLDSDGSFFLYSKLTVDKSRWQQGNVFSCSVMHEALHNHYTQKSLSLSPGGGG |
| | GSGGGGSGGGGSPGPVPPSTAVRALIEELINITQNQKAPLCNGSMVWSINLTAGMYC |
| | AALESLINVSGCSAIEKTQDMLSGFCPHKVSAGQFSSLHVRSSKIEVAQFVKDLLFHLR |
| | TLFREGQFN |
| SEQ ID NO: 156 | GENE 1 & 2: |
| Fc4-MDNA413 | APPCPSCPAPEFLGGPSVFLFPPKPKDTLMISRTPEVTCVVVDVSQEDPEVQFNWYVDGVE |
| (1:2) | VHNAKTKPREEQFNSTYRVVSVLTVLHQDWLNGKEYKCKVSNKGLPSSIEKTISKAKGQPR |
| | EPQVYTLPPSQEEMTKNQVSLTCLVKGFYPSDIAVEWESNGQPENNYKTTPPVLDSDGSFF |
| | LYSRLTVDKSRWQEGNVFSCSVMHEALHNHYTQKSLSLSPGKGGGSGSPGPVPPSTAVRAL |
| | IEELINITQNQKAPLCNGSMVWSINRTAGMYCAALESLINVSGCSAIEKTQDMLSGFCPHK |
| | VSAGQFSSLHVRSSKIEVAQFVKDLLFHLRTLFREGQFN |
| SEQ ID NOS: 157 | Gene 1: |
| and 213 | PGPVPPSTAVRALIEELINITQNQKAPLCNGSMVWSINRTAGMYCAALESLINVSGCSAIE |
| MDNA413-Fc (1:1 | KTQDMLSGFCPHKVSAGQFSSLHVRSSKIEVAQFVKDLLFHLRTLFREGQFNGGGGSGGGG |
| KIH) | SGGGGSDKTHTCPPCPAPELLGGPSVFLFPPKPKDTLMISRTPEVTCVVVDVSHEDPEVKF |
| | NWYVDGVEVHNAKTKPREEQYASTYRVVSVLTVLHQDWLNGKEYKCKVSNKALPAPIEKTI |
| | SKAKGQPREPQVYTLPPCRDELTKNQVSLWCLVKGFYPSDIAVEWESNGQPENNYKTTPPV |
| | LDSDGSFFLYSKLTVDKSRWQQGNVFSCSVMHEALHNHYTQKSLSLSPGK (SEQ ID |
| | NO: 157) |
| | Gene 2: |
| | DKTHTCPPCPAPELLGGPSVFLFPPKPKDTLMISRTPEVTCVVVDVSHEDPEVKFNWYVDG |
| | VEVHNAKTKPREEQYASTYRVVSVLTVLHQDWLNGKEYKCKVSNKALPAPIEKTISKAKGQ |
| | PREPQVCTLPPSREEMTKNQVSLSCAVKGFYPSDIAVEWESNGQPENNYKTTPPVLDSDGS |
| | FFLVSKLTVDKSRWQQGNVFSCSVMHEALHNHYTQKSLSLSPGK (SEQ ID NO: |
| | 213) |
| SEQ ID NO: 158 | APTSSSTKKTQLQLEHLLLDLQMILNGINNYKNPKLTRMLTFKFYMPKKATELKHLQCLEE |
| MDNA109-Fc | ELKPLEEVLNLAQSKNFHFDPRDVVSNINVFVLELKGSETTFMCEYADETATIVEFLNRWI |
| (2:1) | TFCQSIISTLTGGGGSGGGGSGGGGSDKTHTCPPCPAPELLGGPSVFLFPPKPKDTLMISR |
| | TPEVTCVVVDVSHEDPEVKFNWYVDGVEVHNAKTKPREEYASTYRVVSVLTVLHQDWLNGK |
| | EYKCKVSNKALPAPIEKTISKAKGQPREPQVYTLPPSREEMTKNQVSLTCLVKGFYPSDIA |
| | VEWESNGQPENNYKTTPPVLDSDGSFFLYSKLTVDKSRWQQGNVFSCSVMHEALHNHYTQK |
| | SLSLSPGK |
| SEQ ID NO: 159 | Gene 1 and Gene 2: |
| MDNA-109FEAA-Fc | APTSSSTKKTQLQLEHLLLDLQMILNGINNYKNPKLTRMLTAKFYMPKKATELKHLQCLEE |
| (2:1) | ALKPLEEVLNLAQSKNFHFDPRDVVSNINVFVLELKGSETTFMCEYADETATIVEFLNRWI |
| | TFCQSIISTLTGGGGSGGGGSGGGGSDKTHTCPPCPAPELLGGPSVFLFPPKPKDTLMISR |
| | TPEVTCVVVDVSHEDPEVKFNWYVDGVEVHNAKTKPREEQYASTYRVVSVLTVLHQDWLNG |
| | KEYKCKVSNKALPAPIEKTISKAKGQPREPQVYTLPPSREEMTKNQVSLTCLVKGFYPSDI |
| | AVEWESNGQPENNYKTTPPVLDSDGSFFLYSKLTVDKSRWQQGNVFSCSVMHEALHNHYTQ |
| | KSLSLSPGK |
| SEQ ID NO: 160 | Gene 1 and Gene 2: |
| Fc-MDNA109 | DKTHTCPPCPAPELLGGPSVFLFPPKPKDTLMISRTPEVTCVVVDVSHEDPEVKFNWYVDG |
| (1:2) | VEVHNAKTKPREEQYASTYRVVSVLTVLHQDWLNGKEYKCKVSNKALPAPIEKTISKAKGQ |
| | PREPQVYTLPPSREEMTKNQVSLTCLVKGFYPSDIAVEWESNGQPENNYKTTPPVLDSDGS |
| | FFLYSKLTVDKSRWQQGNVFSCSVMHEALHNHYTQKSLSLSPGGGGGSGGGGSGGGGSAPT |
| | SSSTKKTQLQLEHLLLDLQMILNGINNYKNPKLTRMLTFKFYMPKKATELKHLQCLEEELK |
| | PLEEVLNLAQSKNFHFDPRDVVSNINVFVLELKGSETTFMCEYADETATIVEFLNRWITFC |
| | QSIISTLT |
| SEQ ID NOS: 161 | Gene 1: |
| and 215 | APTSSSTKKTQLQLEHLLLDLQMILNGINNYKNPKLTRMLTAKFYMPKKATELKHLQCLEE |
| MDNA109FEAA-Fc- | ALKPLEEVLNLAQSKNFHFDPRDVVSNINVFVLELKGSETTFMCEYADETATIVEFLNRWI |
| MDNA132 (2:1:1 | TFSQSIISTLTGGGGSGGGGSGGGGSDKTHTCPPCPAPELLGGPSVFLFPPKPKDTLMISR |
| KIH) | TPEVTCVVVDVSHEDPEVKFNWYVDGVEVHNAKTKPREEQYASTYRVVSVLTVLHQDWLNG |
| | KEYKCKVSNKALPAPIEKTISKAKGQPREPQVYTLPPCRDELTKNQVSLWCLVKGFYPSDI |
| | AVEWESNGQPENNYKTTPPVLDSDGSFFLYSKLTVDKSRWQQGNVFSCSVMHEALHNHYTQ |
| | KSLSLSPGGGGGSGGGGSGGGGSPGPVPPSTAHRELIEELVNITQNQKAPLCNGSMVWSIN |
| | LTAGMYCAALESLINVSGCSAIEKTQRMLSGFCPHKVSAGQFSSLHVTGRKIEVAQFVKDL |
| | LLHLKKLFKEGQFN (SEQ ID NO: 161) |
| | Gene 2: |
| | APTSSSTKKTQLQLEHLLLDLQMILNGINNYKNPKLTRMLTAKFYMPKKATELKHLQCLEE |
| | ALKPLEEVLNLAQSKNFHFDPRDVVSNINVFVLELKGSETTFMCEYADETATIVEFLNRWI |
| | TFSQSIISTLTGGGGSGGGGSGGGGSDKTHTCPPCPAPELLGGPSVFLFPPKPKDTLMISR |
| | TPEVTCVVVDVSHEDPEVKFNWYVDGVEVHNAKTKPREEQYASTYRVVSVLTVLHQDWLNG |
| | KEYKCKVSNKALPAPIEKTISKAKGQPREPQVCTLPPSRDELTKNQVSLSCAVKGFYPSDI |
| | AVEWESNGQPENNYKTTPPVLDSDGSFFLVSKLTVDKSRWQQGNVFSCSVMHEALHNHYTQ |
| | KSLSLSPG (SEQ ID NO: 215) |
| | MDNA109FEAA sequence in green. |
| | MDNA132 sequence in blue. |
| | Fc Sequence in black; (G4S)3 linker underlined. |
| SEQ ID NOS: 162 | Gene 1: |
| MDNA413-FC- | PGPVPPSTAVRALIEELINITQNQKAPLCNGSMVWSINRTAGMYCAALESLINVSGCSAIE |
| MDNA132 (2:1:1 | KTQDMLSGFCPHKVSAGQFSSLHVRSSKIEVAQFVKDLLFHLRTLFREGQFNGGGGSGGGG |
| KIH) | SGGGGSDKTHTCPPCPAPELLGGPSVFLFPPKPKDTLMISRTPEVTCVVVDVSHEDPEVKF |
| and 216 | NWYVDGVEVHNAKTKPREEQYASTYRVVSVLTVLHQDWLNGKEYKCKVSNKALPAPIEKTI |
| | SKAKGQPREPQVYTLPPCRDELTKNQVSLWCLVKGFYPSDIAVEWESNGQPENNYKTTPPV |
| | LDSDGSFFLYSKLTVDKSRWQQGNVFSCSVMHEALHNHYTQKSLSLSPGGGGGSGGGGSGG |
| | GGSPGPVPPSTAHRELIEELVNITQNQKAPLCNGSMVWSINLTAGMYCAALESLINVSGCS |
| | AIEKTQRMLSGFCPHKVSAGQFSSLHVTGRKIEVAQFVKDLLLHLKKLFKEGQFN (SEQ |
| | ID NO: 162) |
| | Gene 2: |
| | PGPVPPSTAVRALIEELINITQNQKAPLCNGSMVWSINRTAGMYCAALESLINVSGCSAIE |
| | KTQDMLSGFCPHKVSAGQFSSLHVRSSKIEVAQFVKDLLFHLRTLFREGQFNGGGGSGGGG |
| | SGGGGSDKTHTCPPCPAPELLGGPSVFLFPPKPKDTLMISRTPEVTCVVVDVSHEDPEVKF |
| | NWYVDGVEVHNAKTKPREEQYASTYRVVSVLTVLHQDWLNGKEYKCKVSNKALPAPIEKTI |
| | SKAKGQPREPQVCTLPPSRDELTKNQVSLSCAVKGFYPSDIAVEWESNGQPENNYKTTPPV |
| | LDSDGSFFLVSKLTVDKSRWQQGNVFSCSVMHEALHNHYTQKSLSLSPG (SEQ ID NO: |
| | 216) |
| | MDNA413 sequence in red. |
| | MDNA132 sequence in blue. |
| | Fc Sequence in black; (G4S)3 linker underlined. |
| SEQ ID NO: 163 | MDNA109FEAA-Fc-MDNA413 (2:1:2)- SEQUENCE FROM CRO |
| MDNA109FEAA-Fc- | PR00376 |
| MDNA413 (2:1:2)- | APTSSSTKKTQLQLEHLLLDLQMILNGINNYKNPKLTRMLTAKFYMPKKATELKHLQCLEE |
| version 1 | ALKPLEEVLNLAQSKNFHFDPRDVVSNINVFVLELKGSETTFMCEYADETATIVEFLNRWI |
| | TFCQSIISTLTGGGGSGGGGSGGGGSDKTHTCPPCPAPELLGGPSVFLFPPKPKDTLMISR |
| | TPEVTCVVVDVSHEDPEVKFNWYVDGVEVHNAKTKPREEQYASTYRVVSVLTVLHQDWLNG |
| | KEYKCKVSNKALPAPIEKTISKAKGQPREPQVYTLPPSREEMTKNQVSLTCLVKGFYPSDI |
| | AVEWESNGQPENNYKTTPPVLDSDGSFFLYSKLTVDKSRWQQGNVFSCSVMHEALHNHYTQ |
| | KSLSLSPGGGGGSGGGGSGGGGSPGPVPPSTAVRALIEELINITQNQKAPLCNGSMVWSIN |
| | RTAGMYCAALESLINVSGCSAIEKTQDMLSGFCPHKVSAGQFSSLHVRSSKIEVAQFVKDL |
| | LFHLRTLFREGQFN |
| SEQ ID NO: 164 | Gene 1 and Gene 2 |
| MDNA109FEAA-FC- | APTSSSTKKTQLQLEHLLLDLQMILNGINNYKNPKLTRMLTAKFYMPKKATELKHLQCLEE |
| MDNA413 (2:1:2)- | ALKPLEEVLNLAQSKNFHFDPRDVVSNINVFVLELKGSETTFMCEYADETATIVEFLNRWI |
| version 2 | TFSQSIISTLTGGGGSGGGGSGGGGSDKTHTCPPCPAPELLGGPSVFLFPPKPKDTLMISR |
| | TPEVTCVVVDVSHEDPEVKFNWYVDGVEVHNAKTKPREEQYASTYRVVSVLTVLHQDWLNG |
| | KEYKCKVSNKALPAPIEKTISKAKGQPREPQVYTLPPSRDELTKNQVSLTCLVKGFYPSDI |
| | AVEWESNGQPENNYKTTPPVLDSDGSFFLYSKLTVDKSRWQQGNVFSCSVMHEALHNHYTQ |
| | KSLSLSPGGGGGSGGGGSGGGGSPGPVPPSTAVRALIEELINITQNQKAPLCNGSMVWSIN |
| | RTAGMYCAALESLINVSGCSAIEKTQDMLSGFCPHKVSAGQFSSLHVRSSKIEVAQFVKDL |
| | LFHLRTLFREGQFN |
| | MDNA109FEAA sequence in green. |
| | MDNA413 sequence in red. |
| | Fc Sequence in black; (G4S)3 linker underlined. |
| SEQ ID NOS: 165 | MDNA132-Fc-MDNA109 (1:1:1 KiH) SEQUENCE FROM CRO |
| and 213 | PR00328 |
| MDNA132-FC- | Gene 1: |
| MDNA109 (1:1:1 | PGPVPPSTAHRELIEELVNITQNQKAPLCNGSMVWSINLTAGMYCAALESLINVSGCSAIE |
| KIH) | KTQRMLSGFCPHKVSAGQFSSLHVTGRKIEVAQFVKDLLLHLKKLFKEGQFNGGGGSGGGG |
| | SGGGGSDKTHTCPPCPAPELLGGPSVFLFPPKPKDTLMISRTPEVTCVVVDVSHEDPEVKF |
| | NWYVDGVEVHNAKTKPREEQYASTYRVVSVLTVLHQDWLNGKEYKCKVSNKALPAPIEKTI |
| | SKAKGQPREPQVYTLPPCREEMTKNQVSLWCLVKGFYPSDIAVEWESNGQPENNYKTTPPV |
| | LDSDGSFFLYSKLTVDKSRWQQGNVFSCSVMHEALHNHYTQKSLSLSPGGGGSGGGGGSGG |
| | GGSGGGGSAPTSSSTKKTQLQLEHLLLDLQMILNGINNYKNPKLTRMLTFKFYMPKKATEL |
| | KHLQCLEEELKPLEEVLNLAQSKNFHFDPRDVVSNINVFVLELKGSETTFMCEYADETATI |
| | VEFLNRWITFCQSIISTLT (SEQ ID NO: 165) |
| | Gene 2: |
| | DKTHTCPPCPAPELLGGPSVFLFPPKPKDTLMISRTPEVTCVVVDVSHEDPEVKFNWYVDG |
| | VEVHNAKTKPREEQYASTYRVVSVLTVLHQDWLNGKEYKCKVSNKALPAPIEKTISKAKGQ |
| | PREPQVCTLPPSREEMTKNQVSLSCAVKGFYPSDIAVEWESNGQPENNYKTTPPVLDSDGS |
| | FFLVSKLTVDKSRWQQGNVFSCSVMHEALHNHYTQKSLSLSPGK (SEQ ID NO: 213) |
| SEQ ID NOS: 166 | MDNA413-Fc-MDNA109 (1:1:1 KiH)-SEQUENCE FROM CRO |
| and 213 | PR00331 |
| MDNA413-Fc- | Gene1: |
| MDNA109 (1:1:1 | PGPVPPSTAVRALIEELINITQNQKAPLCNGSMVWSINRTAGMYCAALESLINVSGCSAIE |
| KIH) | KTQDMLSGFCPHKVSAGQFSSLHVRSSKIEVAQFVKDLLFHLRTLFREGQFNGGGGSGGGG |
| | SGGGGSDKTHTCPPCPAPELLGGPSVFLFPPKPKDTLMISRTPEVTCVVVDVSHEDPEVKF |
| | NWYVDGVEVHNAKTKPREEQYASTYRVVSVLTVLHQDWLNGKEYKCKVSNKALPAPIEKTI |
| | SKAKGQPREPQVYTLPPCREEMTKNQVSLWCLVKGFYPSDIAVEWESNGQPENNYKTTPPV |
| | LDSDGSFFLYSKLTVDKSRWQQGNVFSCSVMHEALHNHYTQKSLSLSPGGGGSGGGGGSGG |
| | GGSGGGGSAPTSSSTKKTQLQLEHLLLDLQMILNGINNYKNPKLTRMLTFKFYMPKKATEL |
| | KHLQCLEEALKPLEEVLNLAQSKNFHFDPRDVVSNINVFVLELKGSETTFMCEYADETATI |
| | VEFLNRWITFCQSIISTLT (SEQ ID NO: 166) |
| | Gene2: |
| | DKTHTCPPCPAPELLGGPSVFLFPPKPKDTLMISRTPEVTCVVVDVSHEDPEVKFNWYVDG |
| | VEVHNAKTKPREEQYASTYRVVSVLTVLHQDWLNGKEYKCKVSNKALPAPIEKTISKAKGQ |
| | PREPQVCTLPPSREEMTKNQVSLSCAVKGFYPSDIAVEWESNGQPENNYKTTPPVLDSDGS |
| | FFLVSKLTVDKSRWQQGNVFSCSVMHEALHNHYTQKSLSLSPGK (SEQ ID NO: |
| | 213) |
| SEQ ID NOS: 167 | Gene 1 |
| and 217 | PGPVPPSTAHRELIEELVNITQNQKAPLCNGSMVWSINLTAGMYCAALESLINVSGCSAIE |
| MDNA132-Fc- | KTQRMLSGFCPHKVSAGQFSSLHVTGRKIEVAQFVKDLLLHLKKLFKEGQFNGGGGSGGGG |
| MDNA109FEAA | SGGGGSDKTHTCPPCPAPELLGGPSVFLFPPKPKDTLMISRTPEVTCVVVDVSHEDPEVKF |
| (1:1:1KIH) | NWYVDGVEVHNAKTKPREEQYASTYRVVSVLTVLHQDWLNGKEYKCKVSNKALPAPIEKTI |
| | SKAKGQPREPQVYTLPPCREEMTKNQVSLWCLVKGFYPSDIAVEWESNGQPENNYKTTPPV |
| | LDSDGSFFLYSKLTVDKSRWQQGNVFSCSVMHEALHNHYTQKSLSLSPGGGGSGGGGGSGG |
| | GGSGGGGSAPTSSSTKKTQLQLEHLLLDLQMILNGINNYKNPKLTRMLTAKFYMPKKATEL |
| | KHLQCLEEALKPLEEVLNLAQSKNFHFDPRDVVSNINVFVLELKGSETTFMCEYADETATI |
| | VEFLNRWITFCQSIISTLT (SEQ ID NO: 167) |
| | Gene 2 |
| | DKTHTCPPCPAPELLGGPSVFLFPPKPKDTLMISRTPEVTCVVVDVSHEDPEVKFNWYVDG |
| | VEVHNAKTKPREEQYASTYRVVSVLTVLHQDWLNGKEYKCKVSNKALPAPIEKTISKAKGQ |
| | PREPQVCTLPPSREEMTKNQVSLSCAVKGFYPSDIAVEWESNGQPENNYKTTPPVLDSDGS |
| | FFLVSKLTVDKSRWQQGNVFSCSVMHEALHNHYTQKSLSLSPGK (SEQ ID NO: |
| | 217) |
| | MDNA132 sequence in blue |
| | MDNA109FEAA sequence in green |
| | Fc (KIH) sequence in black; (G4S) 3 linker underlined |
| SEQ ID NO: 168 | Gene 1 and Gene 2 |
| Fc-MDNA413 (1:2) | DKTHTCPPCPAPELLGGPSVFLFPPKPKDTLMISRTPEVTCVVVDVSHEDPEVKFNWYVDG |
| Version A | VEVHNAKTKPREEQYASTYRVVSVLTVLHQDWLNGKEYKCKVSNKALPAPIEKTISKAKGQ |
| | PREPQVYTLPPSRDELTKNQVSLTCLVKGFYPSDIAVEWESNGQPENNYKTTPPVLDSDGS |
| | FFLYSKLTVDKSRWQQGNVFSCSVMHEALHNHYTQKSLSLSPGGGGGSGGGGSGGGGS [symbol] |
| | [symbol] [symbol] [symbol] |
| | [symbol] [symbol] |
| SEQ ID NO: 169 | Gene 1 |
| Fc-MDNA132 (1:1 | DKTHTCPPCPAPELLGGPSVFLFPPKPKDTLMISRTPEVTCVVVDVSHEDPEVKFNWYVDG |
| KIH) | VEVHNAKTKPREEQYASTYRVVSVLTVLHQDWLNGKEYKCKVSNKALPAPIEKTISKAKGQ |
| Version A | PREPQVYTLPPSRDELTKNQVSLTCLVKGFYPSDIAVEWESNGQPENNYKTTPPVLDSDGS |
| | FFLYSKLTVDKSRWQQGNVFSCSVMHEALHNHYTQKSLSLSPGGGGGSGGGGSGGGGS [symbol] |
| | [symbol] [symbol] [symbol] |
| | [symbol] [symbol] |
| SEQ ID NO: 170 | Gene 1 |
| Fc-MDNA132 (1:1 | DKTHTCPPCPAPELLGGPSVFLFPPKPKDTLMISRTPEVTCVVVDVSHEDPEVKFNWYVDG |
| KIH) | VEVHNAKTKPREEQYASTYRVVSVLTVLHQDWLNGKEYKCKVSNKALPAPIEKTISKAKGQ |
| Version B | PREPQVYTLPPSRDELTKNQVSLTCLVKGFYPSDIAVEWESNGQPENNYKTTPPVLDSDGS |
| | FFLYSKLTVDKSRWQQGNVFSCSVMHEALHNHYTQKSLSLSPGGGGGSGGGGSGGGGS [symbol] |
| | [symbol] [symbol] [symbol] |
| | [symbol] [symbol] |
| SEQ ID NO: 171 | Gene 2 |
| FC-MDNA132 (1:1 | DKTHTCPPCPAPELLGGPSVFLFPPKPKDTLMISRTPEVTCVVVDVSHEDPEVKFNWYVDG |
| KIH) | VEVHNAKTKPREEQYASTYRVVSVLTVLHQDWLNGKEYKCKVSNKALPAPIEKTISKAKGQ |
| Version A | PREPQVCTLPPSRDELTKNQVSLSCAVKGFYPSDIAVEWESNGQPENNYKTTPPVLDSDGS |
| | FFLVSKLTVDKSRWQQGNVFSCSVMHEALHNHYTQKSLSLSPG |
| SEQ ID NO: 172 | Gene 1 |
| MDNA109FEAA-FC- | APTSSSTKKTQLQLEHLLLDLQMILNGINNYKNPKLTRMLTAKFYMPKKATELKHLQCLEEALKPLEE |
| MDNA413 (2:1:2) | VLNLAQSKNFHFDPRDVVSNINVFVLELKGSETTFMCEYADETATIVEFLNRWITFSQSIISTLTGGG |
| Version A | GSGGGGSGGGGSDKTHTCPPCPAPELLGGPSVFLFPPKPKDTLMISRTPEVTCVVVDVSHEDPEVKFN |
| | WYVDGVEVHNAKTKPREEQYASTYRVVSVLTVLHQDWLNGKEYKCKVSNKALPAPIEKTISKAKGQPR |
| | EPQVYTLPPSRDELTKNQVSLTCLVKGFYPSDIAVEWESNGQPENNYKTTPPVLDSDGSFFLYSKLTV |
| | DKSRWQQGNVFSCSVMHEALHNHYTQKSLSLSPGGGGGSGGGGSGGGGS [symbol] |
| | [symbol] [symbol] [symbol] |
| | [symbol] |
| SEQ ID NO: 173 | Gene 1 |
| MDNA109FEAA-FC- | APTSSSTKKTQLQLEHLLLDLQMILNGINNYKNPKLTRMLTAKFYMPKKATELKHLQCLEEALKPLEE |
| MDNA413 (2:1:2) | VLNLAQSKNFHFDPRDVVSNINVFVLELKGSETTFMCEYADETATIVEFLNRWITFCQSIISTLTGGG |
| Version B | GSGGGGSGGGGSDKTHTCPPCPAPELLGGPSVFLFPPKPKDTLMISRTPEVTCVVVDVSHEDPEVKFN |
| | WYVDGVEVHNAKTKPREEQYASTYRVVSVLTVLHQDWLNGKEYKCKVSNKALPAPIEKTISKAKGQPR |
| | EPQVYTLPPSRDELTKNQVSLTCLVKGFYPSDIAVEWESNGQPENNYKTTPPVLDSDGSFFLYSKLTV |
| | DKSRWQQGNVFSCSVMHEALHNHYTQKSLSLSPGGGGGSGGGGSGGGGS [symbol] |
| | [symbol] [symbol] [symbol] |
| | [symbol] |
| SEQ ID NO: 174 | Gene 1 |
| MDNA132-Fc- | [symbol] [symbol] [symbol] |
| MDNA109 (1:1:1 | [symbol] [symbol] [symbol] |
| KIH) | SGGGGSDKTHTCPPCPAPELLGGPSVFLFPPKPKDTLMISRTPEVTCVVVDVSHEDPEVKF |
| Version A | NWYVDGVEVHNAKTKPREEQYASTYRVVSVLTVLHQDWLNGKEYKCKVSNKALPAPIEKTI |
| | SKAKGQPREPQVYTLPPSRDELTKNQVSLTCLVKGFYPSDIAVEWESNGQPENNYKTTPPV |
| | LDSDGSFFLYSKLTVDKSRWQQGNVFSCSVMHEALHNHYTQKSLSLSPGGGGGSGGGGSGG |
| | GGSAPTSSSTKKTQLQLEHLLLDLQMILNGINNYKNPKLTRMLTFKFYMPKKATELKHLQC |
| | LEEELKPLEEVLNLAQSKNFHFDPRDVVSNINVFVLELKGSETTFMCEYADETATIVEFLN |
| | RWITFSQSIISTLT |
| SEQ ID NO: 175 | Gene 1 |
| MDNA132-Fc- | [symbol] [symbol] [symbol] |
| MDNA109 (1:1:1 | [symbol] [symbol] [symbol] |
| KIH) | SGGGGSDKTHTCPPCPAPELLGGPSVFLFPPKPKDTLMISRTPEVTCVVVDVSHEDPEVKF |
| Version B | NWYVDGVEVHNAKTKPREEQYASTYRVVSVLTVLHQDWLNGKEYKCKVSNKALPAPIEKTI |
| | SKAKGQPREPQVYTLPPSRDELTKNQVSLTCLVKGFYPSDIAVEWESNGQPENNYKTTPPV |
| | LDSDGSFFLYSKLTVDKSRWQQGNVFSCSVMHEALHNHYTQKSLSLSPGGGGGSGGGGSGG |
| | GGSAPTSSSTKKTQLQLEHLLLDLQMILNGINNYKNPKLTRMLTFKFYMPKKATELKHLQC |
| | LEEELKPLEEVLNLAQSKNFHFDPRDVVSNINVFVLELKGSETTFMCEYADETATIVEFLN |
| | RWITFCQSIISTLT |
| SEQ ID NO: 176 | Gene 1 |
| MDNA132-Fc- | [symbol] [symbol] [symbol] |
| MDNA109 (1:1:1 | [symbol] [symbol] [symbol] |
| KIH) | SGGGGSDKTHTCPPCPAPELLGGPSVFLFPPKPKDTLMISRTPEVTCVVVDVSHEDPEVKF |
| Version C | NWYVDGVEVHNAKTKPREEQYASTYRVVSVLTVLHQDWLNGKEYKCKVSNKALPAPIEKTI |
| | SKAKGQPREPQVYTLPPSRDELTKNQVSLTCLVKGFYPSDIAVEWESNGQPENNYKTTPPV |
| | LDSDGSFFLYSKLTVDKSRWQQGNVFSCSVMHEALHNHYTQKSLSLSPGGGGGSGGGGSGG |
| | GGSAPTSSSTKKTQLQLEHLLLDLQMILNGINNYKNPKLTRMLTFKFYMPKKATELKHLQC |
| | LEEELKPLEEVLNLAQSKNFHFDPRDVVSNINVFVLELKGSETTFMCEYADETATIVEFLN |
| | RWITFSQSIISTLT |
| SEQ ID NO: 177 | Gene 1 |
| MDNA132-Fc- | [symbol] [symbol] [symbol] |
| MDNA109 (1:1:1 | [symbol] [symbol] [symbol] |
| KIH) | SGGGGSDKTHTCPPCPAPELLGGPSVFLFPPKPKDTLMISRTPEVTCVVVDVSHEDPEVKF |
| Version D | NWYVDGVEVHNAKTKPREEQYASTYRVVSVLTVLHQDWLNGKEYKCKVSNKALPAPIEKTI |
| | SKAKGQPREPQVYTLPPSRDELTKNQVSLTCLVKGFYPSDIAVEWESNGQPENNYKTTPPV |
| | LDSDGSFFLYSKLTVDKSRWQQGNVFSCSVMHEALHNHYTQKSLSLSPGGGGGSGGGGSGG |
| | GGSAPTSSSTKKTQLQLEHLLLDLQMILNGINNYKNPKLTRMLTFKFYMPKKATELKHLQC |
| | LEEELKPLEEVLNLAQSKNFHFDPRDVVSNINVFVLELKGSETTFMCEYADETATIVEFLN |
| | RWITFCQSIISTLT |
| SEQ ID NO: 178 | Gene 2 |
| MDNA132-Fc- | DKTHTCPPCPAPELLGGPSVFLFPPKPKDTLMISRTPEVTCVVVDVSHEDPEVKFNWYVDG |
| MDNA109 (1: 1: 1 | VEVHNAKTKPREEQYASTYRVVSVLTVLHQDWLNGKEYKCKVSNKALPAPIEKTISKAKGQ |
| KIH) | PREPQVCTLPPSREEMTKNQVSLSCAVKGFYPSDIAVEWESNGQPENNYKTTPPVLDSDGS |
| Version A | FFLVSKLTVDKSRWQQGNVFSCSVMHEALHNHYTQKSLSLSPGK |

TABLE 13
List of Bispecific Fusion Constructs with Mutations Specified

| Name | Sequence | Mutations |
|---|---|---|
| Fc-MDNA413 | Gene 1 and Gene 2 (Version A) | MDNA413 |
| (1:2) | DKTHTCPPCPAPELLGGPSVFLFPPKPKDTLMISRTPEVTCVVVDVSHE | mutations: |
| | DPEVKFNWYVDGVEVHNAKTKPREEQYASTYRVVSVLTVLHQDWLNGKE | L10V, E12A, |
| | YKCKVSNKALPAPIEKTISKAKGQPREPQVYTLPPSRDELTKNQVSLTC | V18I, L39R, |
| | LVKGFYPSDIAVEWESNGQPENNYKTTPPVLDSDGSFFLYSKLTVDKSR | R65D, D87S, |
| | WQQGNVFSCSVMHEALHNHYTQKSLSLSPGGGGGSGGGGSGGGGSPGPV | T88S, L101F, |
| | PPSTAVRALIEELINITQNQKAPLCNGSMVWSINRTAGMYCAALESLIN | K104R, K105T |
| | VSGCSAIEKTQDMLSGFCPHKVSAGQFSSLHVRSSKIEVAQFVKDLLFH | |
| | LRTLFREGQFN (SEQ ID NO: 168) | |
| Fc- | DKTHTCPPCPAPELLGGPSVFLFPPKPKDTLMISRTPEVTCVVVDVSHE | L10V, E12A, |
| MDNA413^{R39/Q111} | DPEVKFNWYVDGVEVHNAKTKPREEQYASTYRVVSVLTVLHQDWLNGKE | V18I, L39R, |
| (1:2) | YKCKVSNKALPAPIEKTISKAKGQPREPQVYTLPPSRDELTKNQVSLTC | R65D, D87S, |
| | LVKGFYPSDIAVEWESNGQPENNYKTTPPVLDSDGSFFLYSKLTVDKSR | T88S, L101F, |
| | WQQGNVFSCSVMHEALHNHYTQKSLSLSPGGGGGSGGGGSGGGGSPGPV | K104R, K105T |
| | PPSTAVRALIEELINITQNQKAPLCNGSMVWSINRTAGMYCAALESLIN | |
| | VSGCSAIEKTQDMLSGFCPHKVSAGQFSSLHVRSSKIEVAQFVKDLLFH | |
| | LRTLFREGQFN (SEQ ID NO: 218) | |
| Fc-MDNA132 | Gene 1 (Version A) | MDNA132 |
| (1:1 KIH) | DKTHTCPPCPAPELLGGPSVFLFPPKPKDTLMISRTPEVTCVVVDVSHE | mutations: |
| | DPEVKFNWYVDGVEVHNAKTKPREEQYASTYRVVSVLTVLHQDWLNGKE | L10H, R86T, |
| | YKCKVSNKALPAPIEKTISKAKGQPREPQVYTLPPSRDELTKNQVSLTC | D87G, T88R, |
| | LVKGFYPSDIAVEWESNGQPENNYKTTPPVLDSDGSFFLYSKLTVDKSR | R108K |
| | WQQGNVFSCSVMHEALHNHYTQKSLSLSPGGGGGSGGGGSGGGGSPGPV | |
| | PPSTAHRELIEELVNITQNQKAPLCNGSMVWSINLTAGMYCAALESLIN | |
| | VSGCSAIEKTQRMLSGFCPHKVSAGQFSSLHVTGRKIEVAQFVKDLLLH | |
| | LKKLFKEGQFN (SEQ ID NO: 169) | |
| Fc- | Gene 1: | L10H, R86T, |
| MDNA132^{L39/Q111} | DKTHTCPPCPAPELLGGPSVFLFPPKPKDTLMISRTPEVTCVVVDVSHE | D87G, T88R, |
| (1:1 | DPEVKFNWYVDGVEVHNAKTKPREEQYASTYRVVSVLTVLHQDWLNGKE | R108K |
| KIH) | YKCKVSNKALPAPIEKTISKAKGQPREPQVYTLPPSRDELTKNQVSLTC | |
| | LVKGFYPSDIAVEWESNGQPENNYKTTPPVLDSDGSFFLYSKLTVDKSR | |
| | WQQGNVFSCSVMHEALHNHYTQKSLSLSPGGGGGSGGGGSGGGGSPGPV | |
| | PPSTAHRELIEELVNITQNQKAPLCNGSMVWSINLTAGMYCAALESLIN | |
| | VSGCSAIEKTQRMLSGFCPHKVSAGQFSSLHVTGRKIEVAQFVKDLLLH | |
| | LKKLFKEGQFN (SEQ ID NO: 219) | |
| Fc-MDNA132^{L39/R111} | Gene 1: | L10H, R86T, |
| (1:1 KIH) | DKTHTCPPCPAPELLGGPSVFLFPPKPKDTLMISRTPEVTCVVVDVSHE | D87G, T88R, |
| | DPEVKFNWYVDGVEVHNAKTKPREEQYASTYRVVSVLTVLHQDWLNGKE | R108K |
| | YKCKVSNKALPAPIEKTISKAKGQPREPQVYTLPPCRDELTKNQVSLWC | |
| | LVKGFYPSDIAVEWESNGQPENNYKTTPPVLDSDGSFFLYSKLTVDKSR | |
| | WQQGNVFSCSVMHEALHNHYTQKSLSLSPGGGGGSGGGGSGGGGSPGPV | |
| | PPSTAHRELIEELVNITQNQKAPLCNGSMVWSINLTAGMYCAALESLIN | |
| | VSGCSAIEKTQRMLSGFCPHKVSAGQFSSLHVTGRKIEVAQFVKDLLLH | |
| | LKKLFKEGRFN (SEQ ID NO: 220) | |
| Fc-MDNA132 | Gene 1 (Version B) | MDNA132 |
| (1:1 KIH) | DKTHTCPPCPAPELLGGPSVFLFPPKPKDTLMISRTPEVTCVVVDVSHE | mutations: |
| | DPEVKFNWYVDGVEVHNAKTKPREEQYASTYRVVSVLTVLHQDWLNGKE | L10H, L39R, |
| | YKCKVSNKALPAPIEKTISKAKGQPREPQVYTLPPSRDELTKNQVSLTC | R86T, D87G, |
| | LVKGFYPSDIAVEWESNGQPENNYKTTPPVLDSDGSFFLYSKLTVDKSR | T88R, R108K |
| | WQQGNVFSCSVMHEALHNHYTQKSLSLSPGGGGGSGGGGSGGGGSPGPV | |
| | PPSTAHRELIEELVNITQNQKAPLCNGSMVWSINRTAGMYCAALESLIN | |
| | VSGCSAIEKTQRMLSGFCPHKVSAGQFSSLHVTGRKIEVAQFVKDLLLH | |
| | LKKLFKEGQFN (SEQ ID NO: 170) | |
| Fc-MDNA132 | Gene 2 (Version A) | |
| (1:1 KIH) | DKTHTCPPCPAPELLGGPSVFLFPPKPKDTLMISRTPEVTCVVVDVSHE | |
| | DPEVKFNWYVDGVEVHNAKTKPREEQYASTYRVVSVLTVLHQDWLNGKE | |
| | YKCKVSNKALPAPIEKTISKAKGQPREPQVCTLPPSRDELTKNQVSLSC | |
| | AVKGFYPSDIAVEWESNGQPENNYKTTPPVLDSDGSFFLVSKLTVDKSR | |
| | WQQGNVFSCSVMHEALHNHYTQKSLSLSPG (SEQ ID NO: 171) | |
| Fc- | Gene 2: | |
| MDNA132^{L39/Q111} | DKTHTCPPCPAPELLGGPSVFLFPPKPKDTLMISRTPEVTCVVVDVSHE | |
| (1:1 | DPEVKFNWYVDGVEVHNAKTKPREEQYASTYRVVSVLTVLHQDWLNGKE | |
| KIH) | YKCKVSNKALPAPIEKTISKAKGQPREPQVCTLPPSRDELTKNQVSLSC | |
| | AVKGFYPSDIAVEWESNGQPENNYKTTPPVLDSDGSFFLVSKLTVDKSR | |
| | WQQGNVFSCSVMHEALHNHYTQKSLSLSPG (SEQ ID NO: 221) | |
| Fc -MDNA132^{L39/R111} | Gene 2: | |
| (1:1 KIH) | DKTHTCPPCPAPELLGGPSVFLFPPKPKDTLMISRTPEVTCVVVDVSHE | |
| | DPEVKFNWYVDGVEVHNAKTKPREEQYASTYRVVSVLTVLHQDWLNGKE | |
| | YKCKVSNKALPAPIEKTISKAKGQPREPQVCTLPPSRDELTKNQVSLSC | |
| | AVKGFYPSDIAVEWESNGQPENNYKTTPPVLDSDGSFFLVSKLTVDKSR | |
| | WQQGNVFSCSVMHEALHNHYTQKSLSLSPG (SEQ ID NO: 222) | |
| MDNA109FEA | Gene 1 (Version A) | MDNA109 |
| A-Fc- | APTSSSTKKTQLQLEHLLLDLQMILNGINNYKNPKLTRMLTAKFYMPKK | mutations: |
| MDNA413 | ATELKHLQCLEEALKPLEEVLNLAQSKNFHFDPRDVVSNINVFVLELKG | F42A, E62A, |
| (2:1:2) | SETTFMCEYADETATIVEFLNRWITFSQSIISTLTGGGGSGGGGSGGGG | L80F, R81D, |
| | SDKTHTCPPCPAPELLGGPSVFLFPPKPKDTLMISRTPEVTCVVVDVSH | L85V, I86V, |
| | EDPEVKFNWYVDGVEVHNAKTKPREEQYASTYRVVSVLTVLHQDWLNGK | I92F, C125S |
| | EYKCKVSNKALPAPIEKTISKAKGQPREPQVYTLPPSRDELTKNQVSLT | MDNA413 |
| | CLVKGFYPSDIAVEWESNGQPENNYKTTPPVLDSDGSFFLYSKLTVDKS | L10V, E12A, |
| | RWQQGNVFSCSVMHEALHNHYTQKSLSLSPGGGGGSGGGGSGGGGSPGP | V18I, L39R, |
| | VPPSTAVRALIEELINITQNQKAPLCNGSMVWSINRTAGMYCAALESLI | R65D, D87S, |
| | NVSGCSAIEKTQDMLSGFCPHKVSAGQFSSLHVRSSKIEVAQFVKDLLF | T88S, L101F, |
| | HLRTLFREGQFN (SEQ ID NO: 172) | K104R, K105T |
| MDNA109FEA | APTSSSTKKTQLQLEHLLLDLQMILNGINNYKNPKLTRMLTAKFYMPKK | MDNA109FEAA |
| AC125-Fc- | ATELKHLQCLEEALKPLEEVLNLAQSKNFHFDPRDVVSNINVFVLELKG | mutations: |
| MDNA413^{R39/Q111} | SETTFMCEYADETATIVEFLNRWITFCQSIISTLTGGGGSGGGGSGGGG | mutations: |
| (2:1:2) | SDKTHTCPPCPAPELLGGPSVFLFPPKPKDTLMISRTPEVTCVVVDVSH | F42A, E62A, |
| | EDPEVKFNWYVDGVEVHNAKTKPREEQYASTYRVVSVLTVLHQDWLNGK | L80F, R81D, |
| | EYKCKVSNKALPAPIEKTISKAKGQPREPQVYTLPPSRDELTKNQVSLT | L85V, I86V, |
| | CLVKGFYPSDIAVEWESNGQPENNYKTTPPVLDSDGSFFLYSKLTVDKS | I92F |
| | RWQQGNVFSCSVMHEALHNHYTQKSLSLSPGGGGGSGGGGSGGGGSPGP | MDNA413 |
| | VPPSTAVRALIEELINITQNQKAPLCNGSMVWSINRTAGMYCAALESLI | mutations: |
| | NVSGCSAIEKTQDMLSGFCPHKVSAGQFSSLHVRSSKIEVAQFVKDLLF | L10V, E12A, |
| | HLRTLFREGQFN (SEQ ID NO: 223) | L39R, V18I, |
| | | R65D, D87S, |
| | | T88S, L101F, |
| | | K104R, K105T |
| MDNA109FEA | Gene 1 (Version B) | MDNA109 |
| A-Fc- | APTSSSTKKTQLQLEHLLLDLQMILNGINNYKNPKLTRMLTAKFYMPKK | mutations: |
| MDNA413 | ATELKHLQCLEEALKPLEEVLNLAQSKNFHFDPRDVVSNINVFVLELKG | F42A, E62A, |
| (2:1:2) | SETTFMCEYADETATIVEFLNRWITFCQSIISTLTGGGGSGGGGSGGGG | L80F, R81D, |
| | SDKTHTCPPCPAPELLGGPSVFLFPPKPKDTLMISRTPEVTCVVVDVSH | L85V, 186V, |
| | EDPEVKFNWYVDGVEVHNAKTKPREEQYASTYRVVSVLTVLHQDWLNGK | I92F |
| | EYKCKVSNKALPAPIEKTISKAKGQPREPQVYTLPPSRDELTKNQVSLT | MDNA413 |
| | CLVKGFYPSDIAVEWESNGQPENNYKTTPPVLDSDGSFFLYSKLTVDKS | mutations: |
| | RWQQGNVFSCSVMHEALHNHYTQKSLSLSPGGGGGSGGGGSGGGGSPGP | L10V, E12A, |
| | VPPSTAVRALIEELINITQNQKAPLCNGSMVWSINRTAGMYCAALESLI | V18I, L39R, |
| | NVSGCSAIEKTQDMLSGFCPHKVSAGQFSSLHVRSSKIEVAQFVKDLLF | R65D, D87S, |
| | HLRTLFREGQFN (SEQ ID NO: 173) | T88S, L101F, |
| | | K104R, K105T |
| MDNA132- | Gene 1 (Version A) | MDNA132 |
| Fc-MDNA109 | PGPVPPSTAHRELIEELVNITQNQKAPLCNGSMVWSINLTAGMYCAALE | mutations: |
| (1:1:1 | SLINVSGCSAIEKTQRMLSGFCPHKVSAGQFSSLHVTGRKIEVAQFVKD | L10H, R86T, |
| KIH) | LLLHLKKLFKEGQFNGGGGSGGGGSGGGGSDKTHTCPPCPAPELLGGPS | D87G, T88R, |
| | VFLFPPKPKDTLMISRTPEVTCVVVDVSHEDPEVKFNWYVDGVEVHNAK | R108K |
| | TKPREEQYASTYRVVSVLTVLHQDWLNGKEYKCKVSNKALPAPIEKTIS | MDNA109 |
| | KAKGQPREPQVYTLPPSRDELTKNQVSLTCLVKGFYPSDIAVEWESNGQ | mutations: |
| | PENNYKTTPPVLDSDGSFFLYSKLTVDKSRWQQGNVFSCSVMHEALHNH | L80F, R81D, |
| | YTQKSLSLSPGGGGGSGGGGSGGGGSAPTSSSTKKTQLQLEHLLLDLQM | L85V, I86V, |
| | ILNGINNYKNPKLTRMLTFKFYMPKKATELKHLQCLEEELKPLEEVLNL | I92F, C125S |
| | AQSKNFHFDPRDVVSNINVFVLELKGSETTFMCEYADETATIVEFLNRW | |
| | ITFSQSIISTLT (SEQ ID NO: 174) | |
| MDNA132^{L39/Q111}- | PGPVPPSTAHRELIEELVNITQNQKAPLCNGSMVWSINLTAGMYCAALE | MDNA132 |
| Fc- | SLINVSGCSAIEKTQRMLSGFCPHKVSAGQFSSLHVTGRKIEVAQFVKD | mutations: |
| MDNA109 | LLLHLKKLFKEGQFNGGGGSGGGGSGGGGSDKTHTCPPCPAPELLGGPS | L10H, R86T, |
| (1:1:1 | VFLFPPKPKDTLMISRTPEVTCVVVDVSHEDPEVKFNWYVDGVEVHNAK | D87G, T88R, |
| KIH) | TKPREEQYASTYRVVSVLTVLHQDWLNGKEYKCKVSNKALPAPIEKTIS | R108K |
| | KAKGQPREPQVYTLPPSRDELTKNQVSLTCLVKGFYPSDIAVEWESNGQ | MDNA109 |
| | PENNYKTTPPVLDSDGSFFLYSKLTVDKSRWQQGNVFSCSVMHEALHNH | mutations: |
| | YTQKSLSLSPGGGGGSGGGGSGGGGSAPTSSSTKKTQLQLEHLLLDLQM | L80F, R81D, |
| | ILNGINNYKNPKLTRMLTFKFYMPKKATELKHLQCLEEELKPLEEVLNL | L85V, I86V, |
| | AQSKNFHFDPRDVVSNINVFVLELKGSETTFMCEYADETATIVEFLNRW | I92F |
| | ITFCQSIISTLT (SEQ ID NO: 224) | |
| MDNA132- | Gene 1 (Version B) | MDNA132 |
| Fc-MDNA109 | PGPVPPSTAHRELIEELVNITQNQKAPLCNGSMVWSINLTAGMYCAALE | mutations: |
| (1:1:1 | SLINVSGCSAIEKTQRMLSGFCPHKVSAGQFSSLHVTGRKIEVAQFVKD | L10H, R86T, |
| KIH) | LLLHLKKLFKEGQFNGGGGSGGGGSGGGGSDKTHTCPPCPAPELLGGPS | D87G, T88R, |
| | VFLFPPKPKDTLMISRTPEVTCVVVDVSHEDPEVKFNWYVDGVEVHNAK | R108K |
| | TKPREEQYASTYRVVSVLTVLHQDWLNGKEYKCKVSNKALPAPIEKTIS | MDNA109 |
| | KAKGQPREPQVYTLPPSRDELTKNQVSLTCLVKGFYPSDIAVEWESNGQ | mutations: |
| | PENNYKTTPPVLDSDGSFFLYSKLTVDKSRWQQGNVFSCSVMHEALHNH | L80F, R81D, |
| | YTQKSLSLSPGGGGGSGGGGSGGGGSAPTSSSTKKTQLQLEHLLLDLQM | L85V, I86V, |
| | ILNGINNYKNPKLTRMLTFKFYMPKKATELKHLQCLEEELKPLEEVLNL | I92F |
| | AQSKNFHFDPRDVVSNINVFVLELKGSETTFMCEYADETATIVEFLNRW | |
| | ITFCQSIISTLT (SEQ ID NO: 175) | |
| MDNA132- | Gene 1 (Version C) | MDNA132 |
| Fc-MDNA109 | PGPVPPSTAHRELIEELVNITQNQKAPLCNGSMVWSINRTAGMYCAALE | mutations: |
| (1:1:1 | SLINVSGCSAIEKTQRMLSGFCPHKVSAGQFSSLHVTGRKIEVAQFVKD | L10H, L39R, |
| KIH) | LLLHLKKLFKEGQFNGGGGSGGGGSGGGGSDKTHTCPPCPAPELLGGPS | R86T, D87G, |
| | VFLFPPKPKDTLMISRTPEVTCVVVDVSHEDPEVKFNWYVDGVEVHNAK | T88R, R108K |
| | TKPREEQYASTYRVVSVLTVLHQDWLNGKEYKCKVSNKALPAPIEKTIS | MDNA109 |
| | KAKGQPREPQVYTLPPSRDELTKNQVSLTCLVKGFYPSDIAVEWESNGQ | mutations: |
| | PENNYKTTPPVLDSDGSFFLYSKLTVDKSRWQQGNVFSCSVMHEALHNH | L80F, R81D, |
| | YTQKSLSLSPGGGGGSGGGGSGGGGSAPTSSSTKKTQLQLEHLLLDLQM | L85V, I86V, |
| | ILNGINNYKNPKLTRMLTFKFYMPKKATELKHLQCLEEELKPLEEVLNL | I92F, C125S |
| | AQSKNFHFDPRDVVSNINVFVLELKGSETTFMCEYADETATIVEFLNRW | |
| | ITFSQSIISTLT (SEQ ID NO: 174) | |
| MDNA132- | Gene 1 (Version D) | MDNA132 |
| Fc-MDNA109 | PGPVPPSTAHRELIEELVNITQNQKAPLCNGSMVWSINRTAGMYCAALE | mutations: |
| (1:1:1 | SLINVSGCSAIEKTQRMLSGFCPHKVSAGQFSSLHVTGRKIEVAQFVKD | L10H, L39R, |
| KIH) | LLLHLKKLFKEGQFNGGGGSGGGGSGGGGSDKTHTCPPCPAPELLGGPS | R86T, D87G, |
| | VFLFPPKPKDTLMISRTPEVTCVVVDVSHEDPEVKFNWYVDGVEVHNAK | T88R, R108K |
| | TKPREEQYASTYRVVSVLTVLHQDWLNGKEYKCKVSNKALPAPIEKTIS | MDNA109 |
| | KAKGQPREPQVYTLPPSRDELTKNQVSLTCLVKGFYPSDIAVEWESNGQ | mutations: |
| | PENNYKTTPPVLDSDGSFFLYSKLTVDKSRWQQGNVFSCSVMHEALHNH | L80F, R81D, |
| | YTQKSLSLSPGGGGGSGGGGSGGGGSAPTSSSTKKTQLQLEHLLLDLQM | L85V, I86V, |
| | ILNGINNYKNPKLTRMLTFKFYMPKKATELKHLQCLEEELKPLEEVLNL | I92F |
| | AQSKNFHFDPRDVVSNINVFVLELKGSETTFMCEYADETATIVEFLNRW | |
| | ITFCQSIISTLT (SEQ ID NO: 175) | |
| MDNA132- | Gene 2 (Version A) | Fc portion |
| Fc-MDNA109 | DKTHTCPPCPAPELLGGPSVFLFPPKPKDTLMISRTPEVTCVVVDVSHE | |
| (1:1:1 | DPEVKFNWYVDGVEVHNAKTKPREEQYASTYRVVSVLTVLHQDWLNGKE | |
| KIH) | YKCKVSNKALPAPIEKTISKAKGQPREPQVCTLPPSREEMTKNQVSLSC | |
| | AVKGFYPSDIAVEWESNGQPENNYKTTPPVLDSDGSFFLVSKLTVDKSR | |
| | WQQGNVFSCSVMHEALHNHYTQKSLSLSPGK (SEQ ID NO: 213) | |
| MDNA132 | Gene 2: | |
| ^{L39/Q111}-Fc- | DKTHTCPPCPAPELLGGPSVFLFPPKPKDTLMISRTPEVTCVVVDVSHE | |
| MDNA109 | DPEVKFNWYVDGVEVHNAKTKPREEQYASTYRVVSVLTVLHQDWLNGKE | |
| (1:1:1 | YKCKVSNKALPAPIEKTISKAKGQPREPQVCTLPPSREEMTKNQVSLSC | |
| KIH) | AVKGFYPSDIAVEWESNGQPENNYKTTPPVLDSDGSFFLVSKLTVDKSR | |
| | WQQGNVFSCSVMHEALHNHYTQKSLSLSPGK (SEQ ID NO: 225) | |
| MDNA413^{R39/Q111}- | Gene 1: | MDNA413 |
| Fc- | PGPVPPSTAVRALIEELINITQNQKAPLCNGSMVWSINRTAGMYCAALE | mutations: |
| MDNA132^{L39/Q111} | SLINVSGCSAIEKTQDMLSGFCPHKVSAGQFSSLHVRSSKIEVAQFVKD | L10V, E12A, |
| (2:1:1 | LLFHLRTLFREGQFN [symbol] DKTHTCPPCPAPELLGGPS | L39R, V18I, |
| KIH) | VFLFPPKPKDTLMISRTPEVTCVVVDVSHEDPEVKFNWYVDGVEVHNAK | R65D, D87S, |
| | TKPREEQYASTYRVVSVLTVLHQDWLNGKEYKCKVSNKALPAPIEKTIS | T88S, L101F, |
| | KAKGQPREPQVYTLPPCRDELTKNQVSLWCLVKGFYPSDIAVEWESNGQ | K104R, K105T |
| | PENNYKTTPPVLDSDGSFFLYSKLTVDKSRWQQGNVFSCSVMHEALHNH | MDNA132 |
| | YTQKSLSLSPG [symbol] PGPVPPSTAHRELIEELVNITQN | mutations: |
| | QKAPLCNGSMVWSINLTAGMYCAALESLINVSGCSAIEKTQRMLSGFCP | L10H, R86T, |
| | HKVSAGQFSSLHVTGRKIEVAQFVKDLLLHLKKLFKEGQFN (SEQ ID | D87G, T88R, |
| | NO: 177) | R108K |
| | Gene 2: | |
| | PGPVPPSTAVRALIEELINITQNQKAPLCNGSMVWSINRTAGMYCAALE | |
| | SLINVSGCSAIEKTQDMLSGFCPHKVSAGQFSSLHVRSSKIEVAQFVKD | |
| | LLFHLRTLFREGQFN [symbol] DKTHTCPPCPAPELLGGPS | |
| | VFLFPPKPKDTLMISRTPEVTCVVVDVSHEDPEVKFNWYVDGVEVHNAK | |
| | TKPREEQYASTYRVVSVLTVLHQDWLNGKEYKCKVSNKALPAPIEKTIS | |
| | KAKGQPREPQVCTLPPSRDELTKNQVSLSCAVKGFYPSDIAVEWESNGQ | |
| | PENNYKTTPPVLDSDGSFFLVSKLTVDKSRWQQGNVFSCSVMHEALHNH | |
| | YTQKSLSLSPG (SEQ ID NO: 178) | |
| Fc4- | APPCPSCPAPEFLGGPSVFLFPPKPKDTLMISRTPEVTCVVVDVSQEDP | L10V, E12A, |
| MDNA413^{R39/Q111} | EVQFNWYVDGVEVHNAKTKPREEQFNSTYRVVSVLTVLHQDWLNGKEYK | L39R, V18I, |
| (1:2) | CKVSNKGLPSSIEKTISKAKGQPREPQVYTLPPSQEEMTKNQVSLTCLV | R65D, D87S, |
| | KGFYPSDIAVEWESNGQPENNYKTTPPVLDSDGSFFLYSRLTVDKSRWQ | T88S, L101F, |
| | EGNVFSCSVMHEALHNHYTQKSLSLSPGKGGGSGSPGPVPPSTAVRALI | K104R, K105T |
| | EELINITQNQKAPLCNGSMVWSINRTAGMYCAALESLINVSGCSAIEKT | |
| | QDMLSGFCPHKVSAGQFSSLHVRSSKIEVAQFVKDLLFHLRTLFREGQF | |
| | N (SEQ ID NO: 179) | |
| MDNA413^{R39/Q111}- | Gene 1: | MDNA413 |
| Fc- | PGPVPPSTAVRALIEELINITQNQKAPLCNGSMVWSINRTAGMYCAALE | mutations: |
| MDNA109 | SLINVSGCSAIEKTQDMLSGFCPHKVSAGQFSSLHVRSSKIEVAQFVKD | L10V, E12A, |
| (1:1:1 | LLFHLRTLFREGQFN [symbol] DKTHTCPPCPAPELLGGPS | L39R, V18I, |
| KIH) | VFLFPPKPKDTLMISRTPEVTCVVVDVSHEDPEVKFNWYVDGVEVHNAK | R65D, D87S, |
| | TKPREEQYASTYRVVSVLTVLHQDWLNGKEYKCKVSNKALPAPIEKTIS | T88S, L101F, |
| | KAKGQPREPQVYTLPPCREEMTKNQVSLWCLVKGFYPSDIAVEWESNGQ | K104R, K105T |
| | PENNYKTTPPVLDSDGSFFLYSKLTVDKSRWQQGNVFSCSVMHEALHNH | MDNA109 |
| | YTQKSLSLSPG [symbol] APTSSSTKKTQLQLEHLL | mutations: |
| | LDLQMILNGINNYKNPKLTRMLTFKFYMPKKATELKHLQCLEEELKPLE | L80F, R81D, |
| | EVLNLAQSKNFHFDPRDVVSNINVFVLELKGSETTFMCEYADETATIVE | L85V, I86V, |
| | FLNRWITFCQSIISTLT (SEQ ID NO: 180) | I92F |
| | Gene 2: | |
| | DKTHTCPPCPAPELLGGPSVFLFPPKPKDTLMISRTPEVTCVVVDVSHE | |
| | DPEVKFNWYVDGVEVHNAKTKPREEQYASTYRVVSVLTVLHQDWLNGKE | |
| | YKCKVSNKALPAPIEKTISKAKGQPREPQVCTLPPSREEMTKNQVSLSC | |
| | AVKGFYPSDIAVEWESNGQPENNYKTTPPVLDSDGSFFLVSKLTVDKSR | |
| | WQQGNVFSCSVMHEALHNHYTQKSLSLSPGK (SEQ ID NO: 181) | |
| Fc - | DKTHTCPPCPAPELLGGPSVFLFPPKPKDTLMISRTPEVTCVVVDVSHE | L10V, E12A, |
| MDNA413^{L39/Q111} | DPEVKFNWYVDGVEVHNAKTKPREEQYASTYRVVSVLTVLHQDWLNGKE | V18I, R65D, |
| (1:2) | YKCKVSNKALPAPIEKTISKAKGQPREPQVYTLPPSRDELTKNQVSLTC | D87S, T88S |
| | LVKGFYPSDIAVEWESNGQPENNYKTTPPVLDSDGSFFLYSKLTVDKSR | L101F, |
| | WQQGNVFSCSVMHEALHNHYTQKSLSLSPGGGGGSGGGGSGGGGSPGPV | K104R, K105T |
| | PPSTAVRALIEELINITQNQKAPLCNGSMVWSINLTAGMYCAALESLIN | |
| | VSGCSAIEKTQDMLSGFCPHKVSAGQFSSLHVRSSKIEVAQFVKDLLFH | |
| | LRTLFREGQFN (SEQ ID NO: 182) | |
| MDNA132^{L39/R111}- | Gene 1: | L10H, R86T, |
| Fc | PGPVPPSTAHRELIEELVNITQNQKAPLCNGSMVWSINLTAGMYCAALE | D87G, T88R, |
| (1:1 KIH) | SLINVSGCSAIEKTQRMLSGFCPHKVSAGQFSSLHVTGRKIEVAQFVKD | R108K |
| | LLLHLKKLFKEGRFN [symbol] DKTHTCPPCPAPELLGGPS | |
| | VFLFPPKPKDTLMISRTPEVTCVVVDVSHEDPEVKFNWYVDGVEVHNAK | |
| | TKPREEQYASTYRVVSVLTVLHQDWLNGKEYKCKVSNKALPAPIEKTIS | |
| | KAKGQPREPQVYTLPPSRDELTKNQVSLTCLVKGFYPSDIAVEWESNGQ | |
| | PENNYKTTPPVLDSDGSFFLYSKLTVDKSRWQQGNVFSCSVMHEALHNH | |
| | YTQKSLSLSPG (SEQ ID NO: 183) | |
| | Gene 2: | |
| | DKTHTCPPCPAPELLGGPSVFLFPPKPKDTLMISRTPEVTCVVVDVSHE | |
| | DPEVKFNWYVDGVEVHNAKTKPREEQYASTYRVVSVLTVLHQDWLNGKE | |
| | YKCKVSNKALPAPIEKTISKAKGQPREPQVYTLPPSRDELTKNQVSLTC | |
| | LVKGFYPSDIAVEWESNGQPENNYKTTPPVLDSDGSFFLYSKLTVDKSR | |
| | WQQGNVFSCSVMHEALHNHYTQKSLSLSPG (SEQ ID NO: 184) | |
| Fc- | DKTHTCPPCPAPELLGGPSVFLFPPKPKDTLMISRTPEVTCVVVDVSHE | L10H, R86T, |
| MDNA132^{L39/R111} | DPEVKFNWYVDGVEVHNAKTKPREEQYASTYRVVSVLTVLHQDWLNGKE | D87G, T88R, |
| (1:2) | YKCKVSNKALPAPIEKTISKAKGQPREPQVYTLPPSRDELTKNQVSLTC | R108K |
| | LVKGFYPSDIAVEWESNGQPENNYKTTPPVLDSDGSFFLYSKLTVDKSR | |
| | WQQGNVFSCSVMHEALHNHYTQKSLSLSPGGGGGSGGGGSGGGGSPGPV | |
| | PPSTAHRELIEELVNITQNQKAPLCNGSMVWSINLTAGMYCAALESLIN | |
| | VSGCSAIEKTQRMLSGFCPHKVSAGQFSSLHVTGRKIEVAQFVKDLLLH | |
| | LKKLFKEGRFN (SEQ ID NO: 185) | |
| Fc- | DKTHTCPPCPAPELLGGPSVFLFPPKPKDTLMISRTPEVTCVVVDVSHE | L10V, E12A, |
| MDNA413^{L39/R111} | DPEVKFNWYVDGVEVHNAKTKPREEQYASTYRVVSVLTVLHQDWLNGKE | V18I, R65D, |
| (1:2) | YKCKVSNKALPAPIEKTISKAKGQPREPQVYTLPPSRDELTKNQVSLTC | D87S, T88S, |
| | LVKGFYPSDIAVEWESNGQPENNYKTTPPVLDSDGSFFLYSKLTVDKSR | L101F, |
| | WQQGNVFSCSVMHEALHNHYTQKSLSLSPGGGGGSGGGGSGGGGSPGPV | K104R, K105T |
| | PPSTAVRALIEELINITQNQKAPLCNGSMVWSINLTAGMYCAALESLIN | |
| | VSGCSAIEKTQDMLSGFCPHKVSAGQFSSLHVRSSKIEVAQFVKDLLFH | |
| | LRTLFREGRFN (SEQ ID NO: 186) | |
| MDNA413^{L39/Q111}- | PGPVPPSTAVRALIEELINITQNQKAPLCNGSMVWSINLTAGMYCAALE | L10V, E12A, |
| Fc- | SLINVSGCSAIEKTQDMLSGFCPHKVSAGQFSSLHVRSSKIEVAQFVKD | V18I, R65D, |
| MDNA413^{L39/Q111} | LLFHLRTLFREGQFN [symbol] DKTHTCPPCPAPELLGGPS | D87S, T88S, |
| (2:1:2) | VFLFPPKPKDTLMISRTPEVTCVVVDVSHEDPEVKFNWYVDGVEVHNAK | L101F, |
| | TKPREEQYASTYRVVSVLTVLHQDWLNGKEYKCKVSNKALPAPIEKTIS | K104R, K105T |
| | KAKGQPREPQVYTLPPSRDELTKNQVSLTCLVKGFYPSDIAVEWESNGQ | |
| | PENNYKTTPPVLDSDGSFFLYSKLTVDKSRWQQGNVFSCSVMHEALHNH | |
| | YTQKSLSLSPG [symbol] PGPVPPSTAVRALIEELINITQN | |
| | QKAPLCNGSMVWSINLTAGMYCAALESLINVSGCSAIEKTQDMLSGFCP | |
| | HKVSAGQFSSLHVRSSKIEVAQFVKDLLFHLRTLFREGQFN (SEQ | |
| | ID NO: 187) | |
| H4FEAA-Fc- | APTSSSTKKTQLQLEHLLLDLQMILNGINNYKNPKLTRMLTAKFYMPKK | H4FEAA |
| MDNA413^{L39/Q111} | ATELKHLQCLEEALKPLEEVLNLASSKNFHFTPRDVVSNINVFVLELKG | mutations: |
| (2:1:2) | SETTFMCEYADETATIVEFLNRWITFSQSIISTLTGGGGSGGGGSGGGG | F42A, E62A, |
| | SDKTHTCPPCPAPELLGGPSVFLFPPKPKDTLMISRTPEVTCVVVDVSH | Q74S, R81T, |
| | EDPEVKFNWYVDGVEVHNAKTKPREEQYASTYRVVSVLTVLHQDWLNGK | L85V, I92F, |
| | EYKCKVSNKALPAPIEKTISKAKGQPREPQVYTLPPSRDELTKNQVSLT | C125S |
| | CLVKGFYPSDIAVEWESNGQPENNYKTTPPVLDSDGSFFLYSKLTVDKS | MDNA413 |
| | RWQQGNVFSCSVMHEALHNHYTQKSLSLSPGGGGGSGGGGSGGGGSPGP | mutations: |
| | VPPSTAVRALIEELINITQNQKAPLCNGSMVWSINLTAGMYCAALESLI | L10V, E12A, |
| | NVSGCSAIEKTQDMLSGFCPHKVSAGQFSSLHVRSSKIEVAQFVKDLLF | V18I, R65D, |
| | HLRTLFREGQFN (SEQ ID NO: 188) | D87S, T88S, |
| | | L101F, |
| | | K104R, K105T |
| mCD3 IgG- | Gene 1: | L10H, R86T, |
| MDNA132^{L39/Q111} | ASTKGPSVFPLAPSSKSTSGGTAALGCLVKDYFPEPVTVSWNSGALTSG | D87G, T88R, |
| (KiH)* | VHTFPAVLQSSGLYSLSSVVTVPSSSLGTQTYICNVNHKPSNTKVDKKV | R108K |
| (*partial | EPKSCDKTHTCPPCPAPELLGGPSVFLFPPKPKDTLMISRTPEVTCVVV | |
| sequence) | DVSHEDPEVKFNWYVDGVEVHNAKTKPREEQYASTYRVVSVLTVLHQDW | |
| | LNGKEYKCKVSNKALPAPIEKTISKAKGQPREPQVYTLPPCRDELTKNQ | |
| | VSLWCLVKGFYPSDIAVEWESNGQPENNYKTTPPVLDSDGSFFLYSKLT | |
| | VDKSRWQQGNVFSCSVMHEALHNHYTQKSLSLSPG [symbol] | |
| | [symbol] PGPVPPSTAHRELIEELVNITQNQKAPLCNGSMVWSINLTAGMYCAAL | |
| | ESLINVSGCSAIEKTQRMLSGFCPHKVSAGQFSSLHVTGRKIEVAQFVK | |
| | DLLLHLKKLFKEGQFN (SEQ ID NO: 189) | |
| | Gene 2: | |
| | ASTKGPSVFPLAPSSKSTSGGTAALGCLVKDYFPEPVTVSWNSGALTSG | |
| | VHTFPAVLQSSGLYSLSSVVTVPSSSLGTQTYICNVNHKPSNTKVDKKV | |
| | EPKSCDKTHTCPPCPAPELLGGPSVFLFPPKPKDTLMISRTPEVTCVVV | |
| | DVSHEDPEVKFNWYVDGVEVHNAKTKPREEQYASTYRVVSVLTVLHQDW | |
| | LNGKEYKCKVSNKALPAPIEKTISKAKGQPREPQVCTLPPSRDELTKNQ | |
| | VSLSCAVKGFYPSDIAVEWESNGQPENNYKTTPPVLDSDGSFFLVSKLT | |
| | VDKSRWQQGNVFSCSVMHEALHNHYTQKSLSLSPGK (SEQ ID | |
| | NO: 190) | |
| | Gene 3: | |
| | RTVAAPSVFIFPPSDEQLKSGTASVVCLLNNFYPREAKVQWKVDNALQS | |
| | GNSQESVTEQDSKDSTYSLSSTLTLSKADYEKHKVYACEVTHQGLSSPV | |
| | TKSFNRGEC (SEQ ID NO: 191) | |
| huCD3 IgG- | Gene 1: | L10H, R86T, |
| MDNA132^{L39/Q111} | ASTKGPSVFPLAPSSKSTSGGTAALGCLVKDYFPEPVTVSWNSGALTSG | D87G, T88R, |
| (KiH)* | VHTFPAVLQSSGLYSLSSVVTVPSSSLGTQTYICNVNHKPSNTKVDKKV | R108K |
| (*partial | EPKSCDKTHTCPPCPAPELLGGPSVFLFPPKPKDTLMISRTPEVTCVVV | |
| sequence) | DVSHEDPEVKFNWYVDGVEVHNAKTKPREEQYASTYRVVSVLTVLHQDW | |
| | LNGKEYKCKVSNKALPAPIEKTISKAKGQPREPQVYTLPPCRDELTKNQ | |
| | VSLWCLVKGFYPSDIAVEWESNGQPENNYKTTPPVLDSDGSFFLYSKLT | |
| | VDKSRWQQGNVFSCSVMHEALHNHYTQKSLSLSP [symbol] | |
| | [symbol] PGPVPPSTAHRELIEELVNITQNQKAPLCNGSMVWSINLTAGMYCAAL | |
| | ESLINVSGCSAIEKTQRMLSGFCPHKVSAGQFSSLHVTGRKIEVAQFVK | |
| | DLLLHLKKLFKEGQFN (SEQ ID NO: 192) | |
| | Gene 2: | |
| | ASTKGPSVFPLAPSSKSTSGGTAALGCLVKDYFPEPVTVSWNSGALTSG | |
| | VHTFPAVLQSSGLYSLSSVVTVPSSSLGTQTYICNVNHKPSNTKVDKKV | |
| | EPKSCDKTHTCPPCPAPELLGGPSVFLFPPKPKDTLMISRTPEVTCVVV | |
| | DVSHEDPEVKFNWYVDGVEVHNAKTKPREEQYASTYRVVSVLTVLHQDW | |
| | LNGKEYKCKVSNKALPAPIEKTISKAKGQPREPQVCTLPPSRDELTKNQ | |
| | VSLSCAVKGFYPSDIAVEWESNGQPENNYKTTPPVLDSDGSFFLVSKLT | |
| | VDKSRWQQGNVFSCSVMHEALHNHYTQKSLSLSPGK (SEQ ID | |
| | NO: 193) | |
| | Gene 3: | |
| | RTVAAPSVFIFPPSDEQLKSGTASVVCLLNNFYPREAKVQWKVDNALQS | |
| | GNSQESVTEQDSKDSTYSLSSTLTLSKADYEKHKVYACEVTHQGLSSPV | |
| | TKSFNRGEC (SEQ ID NO: 194) | |
| mPD1 IgG- | Gene 1: | L10H, R86T, |
| MDNA132^{L39/Q111} | ASTKGPSVFPLAPSSKSTSGGTAALGCLVKDYFPEPVTVSWNSGALTSG | D87G, T88R, |
| (KiH)* | VHTFPAVLQSSGLYSLSSVVTVPSSSLGTQTYICNVNHKPSNTKVDKKV | R108K |
| (*partial | EPKSCDKTHTCPPCPAPELLGGPSVFLFPPKPKDTLMISRTPEVTCVVV | |
| sequence) | DVSHEDPEVKFNWYVDGVEVHNAKTKPREEQYASTYRVVSVLTVLHQDW | |
| | LNGKEYKCKVSNKALPAPIEKTISKAKGQPREPQVYTLPPCRDELTKNQ | |
| | VSLWCLVKGFYPSDIAVEWESNGQPENNYKTTPPVLDSDGSFFLYSKLT | |
| | VDKSRWQQGNVFSCSVMHEALHNHYTQKSLSLSPG [symbol] | |
| | [symbol] PGPVPPSTAHRELIEELVNITQNQKAPLCNGSMVWSINLTAGMYCAAL | |
| | ESLINVSGCSAIEKTQRMLSGFCPHKVSAGQFSSLHVTGRKIEVAQFVK | |
| | DLLLHLKKLFKEGQFN (SEQ ID NO: 195) | |
| | Gene 2: | |
| | ASTKGPSVFPLAPSSKSTSGGTAALGCLVKDYFPEPVTVSWNSGALTSG | |
| | VHTFPAVLQSSGLYSLSSVVTVPSSSLGTQTYICNVNHKPSNTKVDKKV | |
| | EPKSCDKTHTCPPCPAPELLGGPSVFLFPPKPKDTLMISRTPEVTCVVV | |
| | DVSHEDPEVKFNWYVDGVEVHNAKTKPREEQYASTYRVVSVLTVLHQDW | |
| | LNGKEYKCKVSNKALPAPIEKTISKAKGQPREPQVCTLPPSRDELTKNQ | |
| | VSLSCAVKGFYPSDIAVEWESNGQPENNYKTTPPVLDSDGSFFLVSKLT | |
| | VDKSRWQQGNVFSCSVMHEALHNHYTQKSLSLSPGK (SEQ ID | |
| | NO: 196) | |
| | Gene 3: | |
| | RTVAAPSVFIFPPSDEQLKSGTASVVCLLNNFYPREAKVQWKVDNALQS | |
| | GNSQESVTEQDSKDSTYSLSSTLTLSKADYEKHKVYACEVTHQGLSSPV | |
| | TKSFNRGEC (SEQ ID NO: 197) | |
| huPD1 IgG- | Gene 1: | L10H, R86T, |
| MDNA132^{L39/Q111} | ASTKGPSVFPLAPSSKSTSGGTAALGCLVKDYFPEPVTVSWNSGALTSG | D87G, T88R, |
| (KiH)* | VHTFPAVLQSSGLYSLSSVVTVPSSSLGTQTYICNVNHKPSNTKVDKKV | R108K |
| (*partial | EPKSCDKTHTCPPCPAPELLGGPSVFLFPPKPKDTLMISRTPEVTCVVV | |
| sequence) | DVSHEDPEVKFNWYVDGVEVHNAKTKPREEQYASTYRVVSVLTVLHQDW | |
| | LNGKEYKCKVSNKALPAPIEKTISKAKGQPREPQVYTLPPCRDELTKNQ | |
| | VSLWCLVKGFYPSDIAVEWESNGQPENNYKTTPPVLDSDGSFFLYSKLT | |
| | VDKSRWQQGNVFSCSVMHEALHNHYTQKSLSLSPG [symbol] | |
| | [symbol] PGPVPPSTAHRELIEELVNITQNQKAPLCNGSMVWSINLTAGMYCAAL | |
| | ESLINVSGCSAIEKTQRMLSGFCPHKVSAGQFSSLHVTGRKIEVAQFVK | |
| | DLLLHLKKLFKEGQFN (SEQ ID NO: 198) | |
| | Gene 2: | |
| | ASTKGPSVFPLAPSSKSTSGGTAALGCLVKDYFPEPVTVSWNSGALTSG | |
| | VHTFPAVLQSSGLYSLSSVVTVPSSSLGTQTYICNVNHKPSNTKVDKKV | |
| | EPKSCDKTHTCPPCPAPELLGGPSVFLFPPKPKDTLMISRTPEVTCVVV | |
| | DVSHEDPEVKFNWYVDGVEVHNAKTKPREEQYASTYRVVSVLTVLHQDW | |
| | LNGKEYKCKVSNKALPAPIEKTISKAKGQPREPQVCTLPPSRDELTKNQ | |
| | VSLSCAVKGFYPSDIAVEWESNGQPENNYKTTPPVLDSDGSFFLVSKLT | |
| | VDKSRWQQGNVFSCSVMHEALHNHYTQKSLSLSPGK (SEQ ID | |
| | NO: 199) | |
| | Gene 3: | |
| | RTVAAPSVFIFPPSDEQLKSGTASVVCLLNNFYPREAKVQWKVDNALQS | |
| | GNSQESVTEQDSKDSTYSLSSTLTLSKADYEKHKVYACEVTHQGLSSPV | |
| | TKSFNRGEC (SEQ ID NO: 200) | |
| mPD1 IgG- | Gene 1: | F42A, E62A, |
| MDNA109FEAA^{S125} | ASTKGPSVFPLAPSSKSTSGGTAALGCLVKDYFPEPVTVSWNSGALTSG | L80F, R81D, |
| (KiH)* | VHTFPAVLQSSGLYSLSSVVTVPSSSLGTQTYICNVNHKPSNTKVDKKV | L85V, I86V, |
| (*partial | EPKSCDKTHTCPPCPAPELLGGPSVFLFPPKPKDTLMISRTPEVTCVVV | I92F, C125S |
| sequence) | DVSHEDPEVKFNWYVDGVEVHNAKTKPREEQYASTYRVVSVLTVLHQDW | |
| | LNGKEYKCKVSNKALPAPIEKTISKAKGQPREPQVYTLPPCRDELTKNQ | |
| | VSLWCLVKGFYPSDIAVEWESNGQPENNYKTTPPVLDSDGSFFLYSKLT | |
| | VDKSRWQQGNVFSCSVMHEALHNHYTQKSLSLSPG [symbol] | |
| | [symbol] APTSSSTKKTQLQLEHLLLDLQMILNGINNYKNPKLTRMLTAKFYMPK | |
| | KATELKHLQCLEEALKPLEEVLNLAQSKNFHFDPRDVVSNINVFVLELK | |
| | GSETTFMCEYADETATIVEFLNRWITFSQSIISTLT (SEQ ID | |
| | NO: 201) | |
| | Gene 2: | |
| | ASTKGPSVFPLAPSSKSTSGGTAALGCLVKDYFPEPVTVSWNSGALTSG | |
| | VHTFPAVLQSSGLYSLSSVVTVPSSSLGTQTYICNVNHKPSNTKVDKKV | |
| | EPKSCDKTHTCPPCPAPELLGGPSVFLFPPKPKDTLMISRTPEVTCVVV | |
| | DVSHEDPEVKFNWYVDGVEVHNAKTKPREEQYASTYRVVSVLTVLHQDW | |
| | LNGKEYKCKVSNKALPAPIEKTISKAKGQPREPQVCTLPPSRDELTKNQ | |
| | VSLSCAVKGFYPSDIAVEWESNGQPENNYKTTPPVLDSDGSFFLVSKLT | |
| | VDKSRWQQGNVFSCSVMHEALHNHYTQKSLSLSPGK (SEQ ID | |
| | NO: 202) | |
| | Gene 3: | |
| | RTVAAPSVFIFPPSDEQLKSGTASVVCLLNNFYPREAKVQWKVDNALQS | |
| | GNSQESVTEQDSKDSTYSLSSTLTLSKADYEKHKVYACEVTHQGLSSPV | |
| | TKSFNRGEC (SEQ ID NO: 203) | |
| huPD1 IgG- | Gene 1: | F42A, E62A, |
| MDNA109FEAA^{S125} | ASTKGPSVFPLAPSSKSTSGGTAALGCLVKDYFPEPVTVSWNSGALTSG | L80F, R81D, |
| (KiH)* | VHTFPAVLQSSGLYSLSSVVTVPSSSLGTQTYICNVNHKPSNTKVDKKV | L85V, I86V, |
| (*partial | EPKSCDKTHTCPPCPAPELLGGPSVFLFPPKPKDTLMISRTPEVTCVVV | I92F, C125S |
| sequence) | DVSHEDPEVKFNWYVDGVEVHNAKTKPREEQYASTYRVVSVLTVLHQDW | |
| | LNGKEYKCKVSNKALPAPIEKTISKAKGQPREPQVYTLPPCRDELTKNQ | |
| | VSLWCLVKGFYPSDIAVEWESNGQPENNYKTTPPVLDSDGSFFLYSKLT | |
| | VDKSRWQQGNVFSCSVMHEALHNHYTQKSLSLSPG [symbol] | |
| | [symbol] APTSSSTKKTQLQLEHLLLDLQMILNGINNYKNPKLTRMLTAKFYMPK | |
| | KATELKHLQCLEEALKPLEEVLNLAQSKNFHFDPRDVVSNINVFVLELK | |
| | GSETTFMCEYADETATIVEFLNRWITFSQSIISTLT (SEQ ID | |
| | NO: 204) | |
| | Gene 2: | |
| | ASTKGPSVFPLAPSSKSTSGGTAALGCLVKDYFPEPVTVSWNSGALTSG | |
| | VHTFPAVLQSSGLYSLSSVVTVPSSSLGTQTYICNVNHKPSNTKVDKKV | |
| | EPKSCDKTHTCPPCPAPELLGGPSVFLFPPKPKDTLMISRTPEVTCVVV | |
| | DVSHEDPEVKFNWYVDGVEVHNAKTKPREEQYASTYRVVSVLTVLHQDW | |
| | LNGKEYKCKVSNKALPAPIEKTISKAKGQPREPQVCTLPPSRDELTKNQ | |
| | VSLSCAVKGFYPSDIAVEWESNGQPENNYKTTPPVLDSDGSFFLVSKLT | |
| | VDKSRWQQGNVFSCSVMHEALHNHYTQKSLSLSPGK (SEQ ID | |
| | NO: 205) | |
| | Gene 3: | |
| | RTVAAPSVFIFPPSDEQLKSGTASVVCLLNNFYPREAKVQWKVDNALQS | |
| | GNSQESVTEQDSKDSTYSLSSTLTLSKADYEKHKVYACEVTHQGLSSPV | |
| | TKSFNRGEC (SEQ ID NO: 206) | |
| mPD1 IgG- | Gene 1: | L10V, E12A, |
| MDNA413^{R39/Q111}* | ASTKGPSVFPLAPSSKSTSGGTAALGCLVKDYFPEPVTVSWNSGALTSG | L39R, V18I, |
| (*partial | VHTFPAVLQSSGLYSLSSVVTVPSSSLGTQTYICNVNHKPSNTKVDKKV | R65D, D87S, |
| sequence) | EPKSCDKTHTCPPCPAPELLGGPSVFLFPPKPKDTLMISRTPEVTCVVV | T88S, L101F |
| | DVSHEDPEVKFNWYVDGVEVHNAKTKPREEQYASTYRVVSVLTVLHQDW | K104R, K105T |
| | LNGKEYKCKVSNKALPAPIEKTISKAKGQPREPQVYTLPPSRDELTKNQ | |
| | VSLTCLVKGFYPSDIAVEWESNGQPENNYKTTPPVLDSDGSFFLYSKLT | |
| | VDKSRWQQGNVFSCSVMHEALHNHYTQKSLSLSPGK [symbol] | |
| | [symbol] PGPVPPSTAVRALIEELINITONQKAPLCNGSMVWSINRTAGMYCAA | |
| | LESLINVSGCSAIEKTQDMLSGFCPHKVSAGQFSSLHVRSSKIEVAQFV | |
| | KDLLFHLRTLFREGQFN (SEQ ID NO: 207) | |
| | Gene 3: | |
| | RTVAAPSVFIFPPSDEQLKSGTASVVCLLNNFYPREAKVQWKVDNALQS | |
| | GNSQESVTEQDSKDSTYSLSSTLTLSKADYEKHKVYACEVTHQGLSSPV | |
| | TKSFNRGEC (SEQ ID NO: 208) | |
| huPD1 IgG- | Gene 1: | L10V, E12A, |
| MDNA413^{R39/Q111}* | ASTKGPSVFPLAPSSKSTSGGTAALGCLVKDYFPEPVTVSWNSGALTSG | L39R, V18I, |
| (*partial | VHTFPAVLQSSGLYSLSSVVTVPSSSLGTQTYICNVNHKPSNTKVDKKV | R65D, D87S, |
| sequence) | EPKSCDKTHTCPPCPAPELLGGPSVFLFPPKPKDTLMISRTPEVTCVVV | T88S, L101F, |
| | DVSHEDPEVKFNWYVDGVEVHNAKTKPREEQYASTYRVVSVLTVLHQDW | K104R, K105T |
| | LNGKEYKCKVSNKALPAPIEKTISKAKGQPREPQVYTLPPSRDELTKNQ | |
| | VSLTCLVKGFYPSDIAVEWESNGQPENNYKTTPPVLDSDGSFFLYSKLT | |
| | VDKSRWQQGNVFSCSVMHEALHNHYTQKSLSLSPGK [symbol] | |
| | [symbol] PGPVPPSTAVRALIEELINITONQKAPLCNGSMVWSINRTAGMYCAA | |
| | LESLINVSGCSAIEKTQDMLSGFCPHKVSAGQFSSLHVRSSKIEVAQFV | |
| | KDLLFHLRTLFREGQFN (SEQ ID NO: 209) | |
| | Gene 3: | |
| | RTVAAPSVFIFPPSDEQLKSGTASVVCLLNNFYPREAKVQWKVDNALQS | |
| | GNSQESVTEQDSKDSTYSLSSTLTLSKADYEKHKVYACEVTHQGLSSPV | |
| | TKSFNRGEC (SEQ ID NO: 210) | |
| MDNA413^{R39/Q111}- | Gene 1: | L10V, E12A, |
| Fc | PGPVPPSTAVRALIEELINITQNQKAPLCNGSMVWSINRTAGMYCAALE | V18I, L39R, |
| (1:1 KIH) | SLINVSGCSAIEKTQDMLSGFCPHKVSAGQFSSLHVRSSKIEVAQFVKD | R65D, D87S, |
| | LLFHLRTLFREGQFN [symbol] DKTHTCPPCPAPELLGGPS | T88S, L101F, |
| | VFLFPPKPKDTLMISRTPEVTCVVVDVSHEDPEVKFNWYVDGVEVHNAK | K104R, K105T |
| | TKPREEQYASTYRVVSVLTVLHQDWLNGKEYKCKVSNKALPAPIEKTIS | |
| | KAKGQPREPQVYTLPPSRDELTKNQVSLTCLVKGFYPSDIAVEWESNGQ | |
| | PENNYKTTPPVLDSDGSFFLYSKLTVDKSRWQQGNVFSCSVMHEALHNH | |
| | YTQKSLSLSPG (SEQ ID NO: 211) | |
| | Gene 2: | |
| | DKTHTCPPCPAPELLGGPSVFLFPPKPKDTLMISRTPEVTCVVVDVSHE | |
| | DPEVKFNWYVDGVEVHNAKTKPREEQYASTYRVVSVLTVLHQDWLNGKE | |
| | YKCKVSNKALPAPIEKTISKAKGQPREPQVCTLPPSRDELTKNQVSLSC | |
| | AVKGFYPSDIAVEWESNGQPENNYKTTPPVLDSDGSFFLVSKLTVDKSR | |
| | WQQGNVFSCSVMHEALHNHYTQKSLSLSPG (SEQ ID NO: 212) | |

[0240] D. Recombinant Expression of IL-2 Muteins, Expression Vectors and Host Cells

[0241] In various embodiments, polypeptides used in the practice of the instant invention are synthetic or are produced by expression of a recombinant nucleic acid molecule. In the event the polypeptide is a chimera (e.g., a fusion protein containing at least a mutant IL-2 polypeptide and a heterologous polypeptide, including a bispecific IL-2 cytokine fusion), it can be encoded by a hybrid nucleic acid molecule containing one sequence that encodes all or part of the IL-2 mutein, and a second sequence that encodes all or part of the heterologous polypeptide. For example, subject IL-2 muteins described herein may be fused to a hexa-histidine tag to facilitate purification of bacterially expressed protein, or to a hemagglutinin tag to facilitate purification of protein expressed in eukaryotic cells.

[0242] Methods for constructing a DNA sequence encoding the IL-2 muteins and expressing those sequences in a suitably transformed host include, but are not limited to, using a PCR-assisted mutagenesis technique. Mutations that consist of deletions or additions of amino acid residues to an IL-2 polypeptide can also be made with standard recombinant techniques. In the event of a deletion or addition, the nucleic acid molecule encoding IL-2 is optionally digested with an appropriate restriction endonuclease. The resulting fragment can either be expressed directly or manipulated further by, for example, ligating it to a second fragment. The ligation may be facilitated if the two ends of the nucleic acid molecules contain complementary nucleotides that overlap one another, but blunt-ended fragments can also be ligated. PCR-generated nucleic acids can also be used to generate various mutant sequences.

[0243] The complete amino acid sequence can be used to construct a back-translated gene. A DNA oligomer containing a nucleotide sequence coding for IL-2 mutein can be synthesized. For example, several small oligonucleotides coding for portions of the desired polypeptide can be synthesized and then ligated. The individual oligonucleotides typically contain 5′ or 3′ overhangs for complementary assembly.

[0244] In addition to generating mutant polypeptides via expression of nucleic acid molecules that have been altered by recombinant molecular biological techniques, subject IL-2 muteins can be chemically synthesized. Chemically synthesized polypeptides are routinely generated by those of skill in the art.

[0245] Once assembled (by synthesis, site-directed mutagenesis or another method), the DNA sequences encoding an IL-2 mutein will be inserted into an expression vector and operatively linked to an expression control sequence appropriate for expression of the IL-2 mutein in the desired transformed host. Proper assembly can be confirmed by nucleotide sequencing, restriction mapping, and expression of a biologically active polypeptide in a suitable host. As is well known in the art, in order to obtain high expression levels of a transfected gene in a host, the gene must be operatively linked to transcriptional and translational expression control sequences that are functional in the chosen expression host.

[0246] The DNA sequence encoding the IL-2 mutein, whether prepared by site directed mutagenesis, chemical synthesis or other methods, can also include DNA sequences that encode a signal sequence. Such signal sequence, if present, should be one recognized by the cell chosen for expression of the IL-2 mutein. It can be prokaryotic, eukaryotic or a combination of the two. It can also be the signal sequence of native IL-2. The inclusion of a signal sequence depends on whether it is desired to secrete the IL-2 mutein from the recombinant cells in which it is made. If the chosen cells are prokaryotic, it generally is preferred that the DNA sequence not encode a signal sequence. If the chosen cells are eukaryotic, it generally is preferred that a signal sequence be encoded and most preferably that the wild-type IL-2 signal sequence be used.

[0247] E. Oncolytic Viruses Targeting Moieties

[0248] In some examples, the bispecific IL-2 cytokine fusion and/or IL-2 muteins described herein can be employed to target an oncolytic virus (e.g., see Allen et al., Mol. Ther. 16:1556-64, 2008). In some examples, oncolytic virus can be used to target an IL-2 mutein to a tumor or TME. Numerous viruses can be employed as the oncolytic virus, including adenoviruses as well as self-replicating alphavirus, as well as oncolyctic vaccinia viruses (see, for example WO2013038066, incorporated herein by reference in its entirety; in particular FIG. 17). Other oncolytic viruses can include Seneca Valley Virus, Newcastle disease Virus (also referred to as Newcastle virus), Maraba virus, vesicular stomatitis virus (VSV), Herpes virus (including HSV-1), Measles virus, poliovirus, reovirus, coxsackie virus, a lentivirus, a morbillivirus, an influenza virus, Sinbis virus, myxoma virus and/or retrovirus (see, for example, Twumasi-Boateng, et al., “Oncolytic viruses as engineering platforms for combination immunotherapy”, Nature Reviews Cancer, 2018), and Kaufman et al., Cancer Immunotherapy, 14:642-662 (2015), all of which are incorporated by reference herein their entireties). In some embodiments, the oncolytic virus includes but is not limited to an adenovirus, a self-replicating alphavirus, a vaccinia virus, a Seneca Valley Virus, a Newcastle disease Virus, a Maraba virus, vesicular stomatitis virus (VSV), a Herpes virus (including HSV-1 and HSV-2), a measles virus, a poliovirus, a reovirus, a coxsackie virus, a lentivirus, a morbillivirus, an influenza virus, Sinbis virus, myxoma virus and/or a retrovirus. The IL-2 superkines (H9 and IL-2 variants as described herein) also can be used to direct T cells/OVs to the TME. An IL-2 variant (such as H9) can boost effector T cells and NK cells while IL-2 variant can suppress T reg activity. Other oncolytic viruses include can include, for example, oncoVex/T-VEC, which involves the intratumoral injection of replication-conditional herpes simplex virus which preferentially infects cancer cells. The virus, which is also engineered to express GM-CSF, is able to replicate inside a cancer cell causing its lysis, releasing new viruses and an array of tumor antigens, and secreting GM-CSF in the process. Such oncolytic virus vaccines enhance DCs function in the tumor microenvironment to stimulate anti-tumor immune responses. These oncolytic viruses can be used to target or deliver the IL-2 muteins described herein to the tumor. In some embodiments, the IL-2 mutein is any IL-2 mutein or variant disclosed herein. In some embodiments, the IL-2 mutein sequence is 90% identical to any one of SEQ ID NO:2 or SEQ ID NO:6 through SEQ ID NO:10 or SEQ ID NO:16. In some embodiments, the IL-2 mutein incudes any one of 5-1 SEQ ID NO:5; 5-2 SEQ ID NO:6; 6-6 SEQ ID NO:7; A2 SEQ ID NO:8; B1 SEQ ID NO:9; B11 SEQ ID NO:10; C5 SEQ ID NO: 11; D10 SEQ ID NO:12; E10 SEQ ID NO:13; G8 SEQ ID NO:14; H4 SEQ ID NO:15; and H9 SEQ ID NO:16. In some embodiments, the substitutions in the IL-2 mutein comprise L80F, R81D, L85V, I86V, and I92F, numbered in accordance with wild-type human IL-2 of SEQ ID NO:2. In some embodiments, the oncolytic virus comprises a transgene capable of expressing an IL-2 mutein as described herein. In some embodiments, the oncolytic virus comprises a transgene capable of expressing an IL-2 mutein comprising the following amino acid substitutions L80F, R81D, L85V, I86V, and I92F, numbered in accordance with wild-type human IL-2 of SEQ ID NO:2. In some embodiments, the oncolytic virus comprises a nucleic acid encoding an IL-2 mutein comprising the following amino acid substitutions L80F, R81D, L85V, I86V, and I92F, numbered in accordance with wild-type human IL-2 of SEQ ID NO:2. In some embodiments, the oncolytic virus comprises a transgene that is expressed as a therapeutic payload. In some embodiments, the therapeutic payload is an I1-2 as described herein. In some embodiments, the therapeutic payload is IL-2 mutein comprising the following amino acid substitutions L80F, R81D, L85V, I86V, and I92F, numbered in accordance with wild-type human IL-2 of SEQ ID NO:2.

[0249] In some embodiments, the oncolytic virus is an oncolytic vaccinia virus. In some embodiments, the oncolytic vaccinia virus vector is characterized in that the virus particle is of the type intracellular mature virus (IMV), intracellular enveloped virus (IEV), cell-associated enveloped virus (CEV), or extracellular enveloped virus (EEV). In some embodiments, the oncolytic vaccinia virus particle is of the type EEV or IMV. In some embodiments, the oncolytic vaccinia virus particle is of the type EEV.

[0250] Generally, construction of oncolytic vaccinia virus recombinants and cells and pharmaceutical compositions comprising the vectors which preferentially replicate in tumor cells and express at least one transgene (for example, and IL-2 mutein as described herein) to facilitate antitumor efficacy and apoptosis induction and to modulate host immune responses in a subject. According to the present invention, oncolytic adenoviruses and oncolytic vaccinia viruses can be combined with IL-2 expression or targeting moieties as described herein in order to target the oncolytic vaccinia virus or the oncolytic adenovirus and/or express the IL-2 mutein. Oncolysis releases tumor antigens and provides costimulatory danger signals. However, arming the virus can improve efficacy further. For example, CD40 ligand (CD40L, CD154) is known to induce apoptosis of tumor cells and it also triggers several immune mechanisms. One of these is a T-helper type 1 (Th1) response that leads to activation of cytotoxic T-cells and reduction of immune suppression. The present invention provides for oncolytic viruses that express the IL-2 muteins of the present invention. In some embodiments, the present invention provides for oncolytic viruses that are targeted (for example, “armed”) with the IL-2 targeting moieties of the present invention.

[0251] In some embodiments, the oncolytic virus is a modified vaccinia virus vector, a virus particle, a host cell, a pharmaceutical composition and a kit comprising vaccinia virus genome wherein the thymidine kinase gene is inactivated by either a substitution in the thymidine kinase (TK) gene and/or an open reading frame ablating deletion of at least one nucleotide providing a partially deleted thymidine kinase gene, the vaccinia growth factor gene is deleted, and the modified vaccinia virus vector comprises at least one nucleic acid sequence encoding a non-viral protein (e.g., an IL-2 mutein as described herein which is capable of being expressed). In another aspect is provided the modified vaccinia virus vector, the virus particle, the pharmaceutical composition or the kit can be used for cancer therapy, for eliciting immune response in a subject, for use in a method of inhibiting malignant cell proliferation in a mammal, for use in a therapy or prophylaxis of cancer, for detecting the presence of the modified vaccinia virus in a subject, and as an in situ cancer vaccine, optionally in combination with adenovirus. In some embodiments, the invention provides method of producing a modified vaccinia virus comprising vaccinia virus genome wherein the thymidine kinase gene is inactivated by a substitution in the thymidine kinase (TK) gene and/or an open reading frame ablating deletion of at least one nucleotide providing a partially deleted thymidine kinase gene, the vaccinia growth factor gene is deleted, and the modified vaccinia virus vector comprises at least one nucleic acid sequence encoding a non-viral protein (e.g., an IL-2 mutein as described herein), comprising the steps of providing producer cells capable of sustaining production of vaccinia virus particles and carrying the modified vaccinia vector; culturing the producer cells in conditions suitable for virus replication and production; and harvesting the virus particles.

[0252] In some embodiments, the present invention provides methods of administering an oncolytic virus “armed” with or including an nucleic acid encoding an IL-2 mutein as described herein, wherein the IL-2 mutein is expressed at the tumor location or is expressed systemically in the subject. In some embodiments, the present invention also provides methods of administering an oncolytic virus “armed” or targeted with an IL-2 mutein as described herein. The routes of administration vary, naturally, with the location and nature of the tumor, and include, e.g., intradermal, transdermal, parenteral, intravenous, intramuscular, intranasal, subcutaneous, regional (e.g., in the proximity of a tumor, particularly with the vasculature or adjacent vasculature of a tumor), percutaneous, intratracheal, intraperitoneal, intraarterial, intravesical, intratumoral, inhalation, perfusion, lavage, and oral administration. Compositions are formulated relative to the particular administration route.

[0253] 1. Oncolytic Vaccinia Virus

[0254] Vaccinia virus is a member of the Orthopoxvirus genus of the Poxviridae. It has large double-stranded DNA genome (˜200 kb, ˜200 genes) and a complex morphogenic pathway produces distinct forms of infectious virions from each infected cell. Viral particles contain lipid membranes(s) around a core. Virus core contains viral structural proteins, tightly compacted viral DNA genome, and transcriptional enzymes. Dimensions of vaccinia virus are ˜360×270×250 nm, and weight of ˜5-10 fg. Genes are tightly packed with little non-coding DNA and open-reading frames (ORFs) lack introns. Three classes of genes (early, intermediate, late) exists. Early genes (˜100 genes; immediate and delayed) code for proteins mainly related to immune modulation and virus DNA replication. Intermediate genes code for regulatory proteins which are required for the expression of late genes (e.g. transcription factors) and late genes code for proteins required to make virus particles and enzymes that are packaged within new virions to initiate the next round of infection. Vaccinia virus replicates in the cell cytoplasm.

[0255] Different strains of vaccinia viruses have been identified (as an example: Copenhagen, modified virus Ankara (MVA), Lister, Tian Tan, Wyeth (=New York City Board of Health), Western Reserve (WR)). The genome of WR vaccinia has been sequenced (Accession number AY243312). In some embodiments, the oncolytic vaccinia virus is a Copenhagen, modified virus Ankara (MVA), Lister, Tian Tan, Wyeth, or Western Reserve (WR) vaccinia virus.

[0256] Different forms of viral particles have different roles in the virus life cycle Several forms of viral particles exist: intracellular mature virus (IMV), intracellular enveloped virus (IEV), cell-associated enveloped virus (CEV), extracellular enveloped virus (EEV). EEV particles have an extra membrane derived from the trans-Golgi network. This outer membrane has two important roles: a) it protects the internal IMV from immune aggression and, b) it mediates the binding of the virus onto the cell surface.

[0257] CEVs and EEVs help virus to evade host antibody and complement by being wrapped in a host-derived membrane. IMV and EEV particles have several differences in their biological properties and they play different roles in the virus life cycle. EEV and IMV bind to different (unknown) receptors (1) and they enter cells by different mechanisms. EEV particles enter the cell via endocytosis and the process is pH sensitive. After internalization, the outer membrane of EEV is ruptured within an acidified endosome and the exposed IMV is fused with the endosomal membrane and the virus core is released into the cytoplasm. IMV, on the other hand, enters the cell by fusion of cell membrane and virus membrane and this process is pH-independent. In addition to this, CEV induces the formation of actin tails from the cell surface that drive virions towards uninfected neighboring cells.

[0258] Furthermore, EEV is resistant to neutralization by antibodies (NAb) and complement toxicity, while IMV is not. Therefore, EEV mediates long range dissemination in vitro and in vivo. Comet-inhibition test has become one way of measuring EEV-specific antibodies since even if free EEV cannot be neutralized by EEV NAb, the release of EEV from infected cells is blocked by EEV NAb and comet shaped plaques cannot be seen. EEV has higher specific infectivity in comparison to IMV particles (lower particle/pfu ratio) which makes EEV an interesting candidate for therapeutic use. However, the outer membrane of EEV is an extremely fragile structure and EEV particles need to be handled with caution which makes it difficult to obtain EEV particles in quantities required for therapeutic applications. EEV outer membrane is ruptured in low pH (pH ˜6). Once EEV outer membrane is ruptured, the virus particles inside the envelope retain full infectivity as an IMV.

[0259] Some host-cell derived proteins co-localize with EEV preparations, but not with IMV, and the amount of cell-derived proteins is dependent on the host cell line and the virus strain. For instance, WR EEV contains more cell-derived proteins in comparison to VV IHD-J strain. Host cell derived proteins can modify biological effects of EEV particles. As an example, incorporation of the host membrane protein CD55 in the surface of EEV makes it resistance to complement toxicity. In the present invention it is shown that human A549 cell derived proteins in the surface of EEV particles may target virus towards human cancer cells. Similar phenomenon has been demonstrated in the study with human immunodeficiency virus type 1, where host-derived ICAM-1 glycoproteins increased viral infectivity. IEV membrane contains at least 9 proteins, two of those not existing in CEV/EEV. F12L and A36R proteins are involved in IEV transport to the cell surface where they are left behind and are not part of CEV/EEV (9, 11). 7 proteins are common in (IEV)/CEV/EEV: F13L, A33R, A34R, A56R, B5R, E2, (K2L). For Western Reserve strain of vaccinia virus, a maximum of 1% of virus particles are normally EEV and released into the culture supernatant before oncolysis of the producer cell. 50-fold more EEV particles are released from International Health Department (IHD)-J strain of vaccinia. IHD has not been studied for use in cancer therapy of humans however. The IHD-W phenotype was attributed largely to a point mutation within the A34R EEV lectin-like protein. Also, deletion of A34R increases the number of EEVs released. EEV particles can be first detected on cell surface 6 hours post-infection (as CEV) and 5 hours later in the supernatant (IHD-J strain). Infection with a low multiplicity of infection (MOI) results in higher rate of EEV in comparison to high viral dose. The balance between CEV and EEV is influenced by the host cell and strain of virus.

[0260] Vaccinia has been used for eradication of smallpox and later, as an expression vector for foreign genes and as a live recombinant vaccine for infectious diseases and cancer. Vaccinia virus is the most widely used pox virus in humans and therefore safety data for human use is extensive. During worldwide smallpox vaccination programs, hundreds of thousands humans have been vaccinated safety with modified vaccinia virus strains and only very rare severe adverse events have been reported. Those are generalized vaccinia (systemic spread of vaccinia in the body), erythema multiforme (toxic/allergic reaction), eczema vaccinatum (widespread infection of the skin), progressive vaccinia (tissue destruction), and postvaccinia! encephalitis.

[0261] All together 44 melanoma patients have been treated in early clinical trials with wild type vaccinia virus in 1960s-1990s and the overall objective response rate of injected tumors was 50%. Also some beneficial immunological responses were seen (36). Wild type vaccinia virus has been used also for treatment of bladder cancer, lung and kidney cancer, and myeloma and only mild adverse events were seen. JX-594, an oncolytic Wyeth strain vaccinia virus coding for GM-CSF, has been successfully evaluated in three phase I studies and preliminary results from randomized phase II trial has been presented in the scientific meeting.

[0262] Vaccinia virus is appealing for cancer gene therapy due to several characteristics. It has natural tropism towards cancer cells and the selectivity can be significantly enhanced by deleting some of the viral genes. The present invention relates to the use of double deleted vaccinia virus (vvdd) in which two viral genes, viral thymidine kinase (TK) and vaccinia growth factor (VGF), are at least partially deleted. TK and VGF genes are needed for virus to replicate in normal but not in cancer cells. The partial TK deletion may be engineered in the TK region conferring activity.

[0263] TK deleted vaccinia viruses are dependent on cellular nucleotide pool present in dividing cells for DNA synthesis and replication. IN some embodiments, the TK deletion limits virus replication significantly in resting cells allowing efficient virus replication to occur only in actively dividing cells (e.g., cancer cells). VGF is secreted from infected cells and has a paracrine priming effect on surrounding cells by acting as a mitogen. Replication of VGF deleted vaccinia viruses is highly attenuated in resting (non-cancer) cells. The effects of TK and VGF deletions have been shown to be synergistic.

[0264] 2. Oncolytic Adenovirus

[0265] Generally, adenovirus is a 36 kb, linear, double-stranded DNA virus (Grunhaus and Horwitz, 1992). The term “adenovirus” or “AAV” includes AAV type 1 (AAV1), AAV type 2 (AAV2), AAV type 3 (AAV3), AAV type 4 (AAV4), AAV type 5 (AAV5), AAV type 6 (AAV6), AAV type 7 (AAV7), AAV type 8 (AAV8), AAV type 9 (AAV9), AAV 9_hu14, avian AAV, bovine AAV, canine AAV, equine AAV, primate AAV, non-primate AAV, and ovine AAV. “Primate AAV” refers to AAV capable of infecting primates, “non-primate AAV” refers to AAV capable of infecting non-primate mammals, “bovine AAV” refers to AAV capable of infecting bovine mammals, etc.

[0266] Adenoviral infection of host cells results in adenoviral DNA being maintained episomally, which reduces the potential genotoxicity associated with integrating vectors. Also, adenoviruses are structurally stable, and no genome rearrangement has been detected after extensive amplification. Adenovirus can infect virtually all epithelial cells regardless of their cell cycle stage, (See, for example, US20060147420, incorporated by reference herein in its entirety.) Moreover, the Ela and E4 regions of adenovirus are essential for an efficient and productive infection of human cells. The Ela gene is the first viral gene to be transcribed in a productive infection, and its transcription is not dependent on the action of any other viral gene products. However, the transcription of the remaining early viral genes requires Ela gene expression. The Ela promoter, in addition to regulating the expression of the Ela gene, also integrates signals for packaging of the viral genome as well as sites required for the initiation of viral DNA replication. See, Schmid, S. I., and Hearing, P. in Current Topics in Microbiology and Immunology, vol. 199: pages 67-80 (1995).

[0267] In some embodiments, the oncolytic virus is an oncolytic adenovirus. It has been established that naturally occurring viruses can be engineered to produce an oncolytic effect in tumor cells (Wildner, 2001; Jacotat, 1967; Kim, 2001; Geoerger et al., 2002; Yan et al., 2003; Vile et al., 2002, each of which is incorporated herein by reference). In the case of adenoviruses, specific deletions within their adenoviral genome can attenuate their ability to replicate within normal quiescent cells, while they retain the ability to replicate in tumor cells. One such conditionally replicating adenovirus, 024, has been described by Fueyo et al. (2000), see also U.S. Patent Application No. 20030138405, each of which are incorporated herein by reference. The A24 adenovirus is derived from adenovirus type 5 (Ad-5) and contains a 24-base-pair deletion within the CR2 portion of the E1A gene. See, for example WO2001036650A2 (incorporated by reference herein in it's entirety.

[0268] Oncolytic adenoviruses include conditionally replicating adenoviruses (CRADs) such as Delta 24, which have several properties that make them candidates for use as biotherapeutic agents. One such property is the ability to replicate in a permissive cell or tissue, which amplifies the original input dose of the oncolytic virus and helps the agent spread to adjacent tumor cells providing a direct antitumor effect.

[0269] In some embodiments, the oncolytic component of Delta 24 with a transgene expression approach to produce an armed Delta 24. Armed Delta 24 adenoviruses may be used for producing or enhancing bystander effects within a tumor and/or producing or enhancing detection/imaging of an oncolytic adenovirus in a patient, or tumor associated tissue and/or cell. In some embodiments the combination of oncolytic adenovirus with various transgene strategies (e.g., expression of and IL-2 mutein) w ill improve the therapeutic potential, including for example, potential against a variety of refractory tumors, as well as provide for improved imaging capabilities. In certain embodiments, an oncolytic adenovirus may be administered with a replication defective adenovirus, another oncolytic virus, a replication competent adenovirus, and/or a wildtype adenovirus. Each of which nay be adminstered concurrently, before or after the other adenoviruses.

[0270] In some embodiments, an Ela adenoviral vectors involves the replacement of the basic adenovirus Ela promoter, including the CAAT box, TATA box and start site for transcription initiation, with a basic promoter that exhibits tumor specificity, and preferably is E2F responsive, and more preferably is the human E2F-1 promoter. Thus, this virus will be repressed in cells that lack molecules, or such molecules are non functional, that activate transcription from the E2F responsive promoter. Normal non dividing, or quiescent cells, fall in this class, as the transcription factor, E2F, is bound to pRb, or retinoblastoma protein, thus making E2F unavailable to bind to and activate the E2F responsive promoter. In contrast, cells that contain free E2F should support E2F based transcription. An example of such cells are neoplastic cells that lack pRb function, allowing for a productive viral infection to occur. In some embodiments, an E1a adenoviral vector is targeted use an IL-2 moiety as described herein.

[0271] Retention of the enhancer sequences, packaging signals, and DNA replication start sites which lie in the Ela promoter will ensure that the adenovirus infection proceeds to wild type levels in the neoplastic cells that lack pRb function. In essence, the modified ET a promoter confers tumor specific transcriptional activation resulting in substantial tumor specific killing, yet provides for enhanced safety in normal cells.

[0272] In some embodiments, an Ela adenoviral vector is prepared by substituting the endogenous E1a promoter with the E2F responsive promoter, the elements upstream of nucleotide 375 in the adenoviral 5 genome are kept intact. The nucleotide numbering is as described by See, Schmid, S. I., and Hearing, P. Current Topics in Microbiology and Immunology, vol. 199: pages 67-80 (1995). This includes all of the seven A repeat motifs identified for packaging of the viral genome. Sequences from nucleotide 375 to nucleotide 536 are deleted by a BsaAI to BsrBI restriction start site, while still retaining 23 base pairs upstream of the translational initiation codon for the ETA protein. An E2F responsive promoter, preferably human E2F-1 is substituted for the deleted endogenous Ela promoter sequences using known materials and methods. The E2F-1 promoter may be isolated as described in Example 1.

[0273] The E4 region has been implicated in many of the events that occur late in adenoviral infection, and is required for efficient viral DNA replication, late mRNA accumulation and protein synthesis, splicing, and the shutoff of host cell protein synthesis. Adenoviruses that are deficient for most of the E4 transcription unit are severely replication defective and, in general, must be propagated in E4 complementing cell lines to achieve high titers. The E4 promoter is positioned near the right end of the viral genome and governs the transcription of multiple open reading frames (ORF). A number of regulatory elements have been characterized in this promoter that are critical for mediating maximal transcriptional activity. In addition to these sequences, the E4 promoter region contains regulatory sequences that are required for viral DNA replication. A depiction of the E4 promoter and the position of these regulatory sequences can be seen in FIGS. 2 and 3 of U.S. Pat. No. 7,001,596, incorporated by reference herein in its entirety.

[0274] In some embodiments, the adenoviral vector that has the E4 basic promoter substituted with one that has been demonstrated to show tumor specificity, preferably an E2F responsive promoter, and more preferably the human E2F-1 promoter. The reasons for preferring an E2F responsive promoter to drive E4 expression are the same as were discussed above in the context of an Ela adenoviral vector having the E1a promoter substituted with an E2F responsive promoter. The tumor suppressor function of pRb correlates with its ability to repress E2F-responsive promoters such as the E2F-1 promoter (Adams, P. D., and W. G. Kaelin, Jr. 1995, Cancer Biol. 6:99-108; Sellers, W. R., and W. G. Kaelin. 1996, published erratum appears in Biochim Biophys Acta 1996 Dec. 9; 1288(3):E-1, Biochim Biophys Acta. 1288:M1-5. Sellers, W. R., J. W. Rodgers, and W. G. Kaelin, Jr. 1995, Proc Natl Acad Sci USA. 92:11544-8.) The human E2F-1 promoter has been extensively characterized and shown to be responsive to the pRb signaling pathway, including pRb/p107, E2F-1/-2/-3, and G1 cyclin/cdk complexes, and ETA (Johnson, D. G., K. Ohtani, and J. R. Nevins. 1994, Genes Dev. 8:1514-25; Neuman, E., E. K. Flemington, W. R. Sellers, and W. G. Kaelin, Jr. 1995. Mol Cell Biol. 15:4660; Neuman, E., W. R. Sellers, J. A. McNeil, J. B. Lawrence, and W. G. Kaelin, Jr. 1996, Gene. 173:163-9.) Most, if not all, of this regulation has been attributed to the presence of multiple E2F sites present within the E2F-1 promoter. Hence, a virus carrying this (these) modification(s) would be expected to be attenuated in normal cells that contain an intact (wild type) pRb pathway, yet exhibit a normal infection/replication profile in cells that are deficient for pRb's repressive function. In order to maintain the normal infection/replication profile of this mutant virus we have retained the inverted terminal repeat (ITR) at the distal end of the E4 promoter as this contains all of the regulatory elements that are required for viral DNA replication (Hatfield, L. and P. Hearing. 1993, J. Virol. 67:3931-9; Rawlins, D. R., P. J. Rosenfeld, R. J. Wides, M. D. Challberg, and T. J. Kelly, Jr. 1984, Cell. 37:309-19; Rosenfeld, P. J., E. A. O'Neill, R. J. Wides, and T. J. Kelly. 1987, Mol Cell Biol. 7:875-86; Wides, R. J., M. D. Challberg, D. R. Rawlins, and T. J. Kelly. 1987, Mol Cell Biol. 7:864-74). This facilitates attaining wild type levels of virus in pRb pathway deficient tumor cells infected with this virus.

[0275] In some embodiments, the E4 promoter is positioned near the right end of the viral genome and it governs the transcription of multiple open reading frames (ORFs) (Freyer, G. A., Y. Katoh, and R. J. Roberts. 1984, Nucleic Acids Res. 12:3503-19; Tigges, M. A., and H. J. Raskas. 1984. Splice junctions in adenovirus 2 early region 4 mRNAs: multiple splice sites produce 18 to 24 RNAs. J. Virol. 50:106-17; Virtanen, A. P. Gilardi, A. Naslund, J. M. LeMoullec, U. Pettersson, and M. Perricaudet. 1984, J. Virol. 51:822-31.) A number of regulatory elements have been characterized in this promoter that mediate transcriptional activity (Berk, A. J. 1986, Annu Rev Genet. 20:45-79; Gilardi, P., and M. Perricaudet. 1986, Nucleic Acids Res. 14:9035-49; Gilardi, P., and M. Perricaudet. 1984, Nucleic Acids Res. 12:7877-88; Hanaka, S., T. Nishigaki, P. A. Sharp, and H. Handa. 1987, Mol Cell Biol. 7:2578-87; Jones, C., and K. A. Lee. 1991, Mol Cell Biol. 11:4297-305; Lee, K. A., and M. R. Green. 1987, Embo J. 6:1345-53.) In addition to these sequences, the E4 promoter region contains elements that are involved in viral DNA replication (Hatfield, L., and P. Hearing. 1993, J Virol. 67:3931-9; Rawlins, D. R., P. J. Rosenfeld, R. J. Wides, M. D. Challberg, and T. J. Kelly, Jr. 1984, Cell. 37:309-19; Rosenfeld, P. J., E. A. O'Neill, R. J. Wides, and T. J. Kelly. 1987, Mol Cell Biol. 7:875-86; Wides, R. J., M. D. Challberg, D. R. Rawlins, and T. J. Kelly. 1987, Mol Cell Biol. 7:864-74.) A depiction of the E4 promoter and the position of these regulatory sequences can be seen in FIGS. 1 and 2. See, also, Jones, C., and K. A. Lee. Mol Cell Biol. 11:4297-305 (1991). With these considerations in mind, an E4 promoter shuttle was designed by creating two novel restriction endonuclease sites: a XhoI site at nucleotide 35,576 and a SpeI site at nucleotide 35,815 (see FIG. 3). Digestion with both XhoI and SpeI removes nucleotides from 35,581 to 35,817. This effectively eliminates bases −208 to +29 relative to the E4 transcriptional start site, including all of the sequences that have been shown to have maximal influence on E4 transcription. In particular, this encompasses the two inverted repeats of E4F binding sites that have been demonstrated to have the most significant effect on promoter activation. However, all three Sp1 binding sites, two of the five ATF binding sites, and both of the NF1 and NFIII/Oct-1 binding sites that are critical for viral DNA replication are retained.

[0276] In some embodiments, the E2F responsive promoter is the human E2F-1 promoter. Key regulatory elements in the E2F-1 promoter that mediate the response to the pRb pathway have been mapped both in vitro and in vivo (Johnson, D. G., K. Ohtani, and J. R. Nevins. 1994, Genes Dev. 8:1514-25; Neuman, E., E. K. Flemington, W. R. Sellers, and W. G. Kaelin, Jr. 1995, Mol Cell Biol. 15:4660; Parr, M. J., Y. Manome, T. Tanaka, P. Wen, D. W. Kufe, W. G. Kaelin, Jr., and H. A. Fine. 1997, Nat Med. 3:1145-9.) Thus, we isolated the human E2F-1 promoter fragment from base pairs −218 to +51, relative to the transcriptional start site, by PCR with primers that incorporated a SpeI and XhoI site into them. This creates the same sites present within the E4 promoter shuttle and allows for direct substitution of the E4 promoter with the E2F-1 promoter.

[0277] F. Nucleic Acid Molecules Encoding Mutant IL-2

[0278] In some embodiments the subject IL-2 mutein, either alone or as a part of a chimeric polypeptide (including a bispecific IL-2 cytokine fusion), such as those described above, can be obtained by expression of a nucleic acid molecule. Just as IL-2 muteins can be described in terms of their identity with wild-type IL-2 polypeptides, the nucleic acid molecules encoding them will necessarily have a certain identity with those that encode wild-type IL-2. For example, the nucleic acid molecule encoding a subject IL-2 mutein can be at least 50%, at least 65%, preferably at least 75%, more preferably at least 85%, and most preferably at least 95% (e.g., 99%) identical to the nucleic acid encoding wild-type IL-2 (e.g., SEQ ID NO:2).

[0279] The nucleic acid molecules provided can contain naturally occurring sequences, or sequences that differ from those that occur naturally, but, due to the degeneracy of the genetic code, encode the same polypeptide. These nucleic acid molecules can consist of RNA or DNA (for example, genomic DNA, cDNA, or synthetic DNA, such as that produced by phosphoramidite-based synthesis), or combinations or modifications of the nucleotides within these types of nucleic acids. In addition, the nucleic acid molecules can be double-stranded or single-stranded (i.e., either a sense or an antisense strand).

[0280] The nucleic acid molecules are not limited to sequences that encode polypeptides; some or all of the non-coding sequences that lie upstream or downstream from a coding sequence (e.g., the coding sequence of IL-2) can also be included. Those of ordinary skill in the art of molecular biology are familiar with routine procedures for isolating nucleic acid molecules. They can, for example, be generated by treatment of genomic DNA with restriction endonucleases, or by performance of the polymerase chain reaction (PCR). In the event the nucleic acid molecule is a ribonucleic acid (RNA), molecules can be produced, for example, by in vitro transcription.

[0281] Exemplary isolated nucleic acid molecules of the present disclosure can include fragments not found as such in the natural state. Thus, this disclosure encompasses recombinant molecules, such as those in which a nucleic acid sequence (for example, a sequence encoding a mutant IL-2) is incorporated into a vector (e.g., a plasmid or viral vector) or into the genome of a heterologous cell (or the genome of a homologous cell, at a position other than the natural chromosomal location).

[0282] As described above, the subject IL-2 mutein may exist as a part of a chimeric polypeptide. In addition to, or in place of, the heterologous polypeptides described above, a subject nucleic acid molecule can contain sequences encoding a “marker” or “reporter.” Examples of marker or reporter genes include β-lactamase, chloramphenicol acetyltransferase (CAT), adenosine deaminase (ADA), aminoglycoside phosphotransferase (neo^{r}, G418^{r}), dihydrofolate reductase (DHFR), hygromycin-B-hosphotransferase (HPH), thymidine kinase (TK), lacz (encoding β-galactosidase), and xanthine guanine phosphoribosyltransferase (XGPRT). One of skill in the art will be aware of additional useful reagents, for example, of additional sequences that can serve the function of a marker or reporter.

[0283] The subject nucleic acid molecules can be obtained by introducing a mutation into IL-2-encoding DNA obtained from any biological cell, such as the cell of a mammal. Thus, the subject nucleic acids (and the polypeptides they encode) can be those of a mouse, rat, guinea pig, cow, sheep, horse, pig, rabbit, monkey, baboon, dog, or cat. In one embodiment, the nucleic acid molecules will be those of a human.

[0284] G. Chimerica Antigen Receptors (Cars)

[0285] Targeted immunotherapy has emerged as promising field of research in the treatment of malignancies and has received a great deal of interest in recent years. Indeed, cures have been reported of lymphoma patients with engineered or genetically modified T cells targeting CD19 malignant cells. This has increased the focus towards antigens present on cancer cells as targets for gene- and immunotherapy. These CARS can be used to target or deliver the bispecific IL-2 cytokine fusion and/or IL-2 muteins described herein to the tumor, or even allow for systemic IL-2 mutein expression. In some embodiments, the IL-2 mutein is any IL-2 mutein or variant disclosed herein. In some embodiments, the IL-2 mutein sequence is 90% identical to any one of SEQ ID NO:2 or SEQ ID NO:6 through SEQ ID NO: 10 or SEQ ID NO:16. In some embodiments, the IL-2 mutein incudes any one of 5-1 SEQ ID NO:5; 5-2 SEQ ID NO:6; 6-6 SEQ ID NO:7; A2 SEQ ID NO:8; B1 SEQ ID NO:9; B11 SEQ ID NO: 10; C5 SEQ ID NO: 11; D10 SEQ ID NO: 12; E10 SEQ ID NO: 13; G8 SEQ ID NO: 14; H4 SEQ ID NO:15; and H9 SEQ ID NO: 16. In some embodiments, the substitutions in the IL-2 mutein comprise L80F, R81D, L85V, I86V, and I92F, numbered in accordance with wild-type human IL-2 of SEQ ID NO:2.

[0286] Genetic manipulation of autologous or allogeneic T cells or NK cells to specifically target a particular tumor antigen provides a strategy to bypass the failure of cytotoxic immune response induction by most tumor cells. In some embodiments, these genetically manipulated T-cells or NK cells can be used to target the IL-2 muteins described herein to the tumor, for example, so that the IL-2 mutein is expressed at the tumor location. These technologies are based on the genetic modification of human immune cells, where the cells may be extracted from a patient or donor by leukapheresis. Specific cells, usually T-cells, are purified and engineered to express a receptor targeting a cancer antigen of interest. Engineering may utilize transduction by retroviral, lentiviral, transposon, mRNA electroporation, and the like. The immune cells may be expanded to the desired dose, and introduced into a patient. The engineered cells can specifically kill cancer cells through cell-mediated toxicity (cytotoxic T-cells) and/or eliciting an immune response to the cancer cell by immune recognition of tumor, cytokine release and immune cell recruitment.

[0287] For example, the application of chimeric antigen receptors (CAR) for immunogene therapy of malignant tumors is a promising strategy in which an antibody or ligand binding domain is fused with the zeta signaling chain of the T cell receptor. The resulting CAR immune cells are redirected by the neospecificity to attack tumors expressing the surface antigen or receptors recognized by the gene-modified T cell receptors and provide cellular therapy that attacks the tumor through normal host immune response in a highly regulated fashion. These cells are free to circulate throughout the brain and systemic circulation, making the need for colocalization and bioavailability less of a problem.

[0288] A number of generations of CAR immune cells have been developed. CARs are created by the fusion of a tumour-specific scFv antibody or other extracellular ligand binding domain to either the TCR-associated CD3ζ signalling domain or another intracellular signalling domains from co-stimulatory protein receptors. This structure allows CARs to have the tumor specificity of the B cell antigen receptor, and to activate T cells through the T cell antigen receptor independently of MHC binding. The first-generation CAR contained one intracellular signalling domain, typically with the CD3ζ signalling domain to allow for TCR signalling. Second-generation CARs have two intracellular signalling domains: a co-stimulatory domain comprising either a CD28 or a 4-1BB signalling domain, coupled with a CD3ζ signalling domain. This arrangement enables T-cell activation and proliferation upon antigen recognition by the scFv region of the CAR. The third-generation CARs have two co-stimulatory domains and a CD3ζ signalling domain. The first co-stimulatory domain is either a CD28 or a 4-1BB domain, with the second co-stimulatory domain consisting of either a CD28, a 4-1BB or a OX40 domain. Fourth-generation “armoured CAR T cells” combine a second-generation CAR with the addition of various genes, including cytokine and co-stimulatory ligands, to enhance the tumoricidal effect of the CAR T cells. See, for example, Batlevi et al. (2016) Nature Reviews Clinical Oncology 13:25-40. See also, U.S. Pat. No. 7,741,465 and International Patent Publication No. WO2014127261; all of which are incorporated by reference herein in their entireties.

[0289] Alternative approaches to T cell targeting include T cell antigen couplers, as described in International application WO2015/117229, entitled “Trifunctional T cell antigen Coupler and Methods and Uses thereof”, herein specifically incorporated by reference. The T cell antigen coupler system comprises three linked domains: a target-specific polypeptide ligand; a ligand that binds a protein associated with the TCR complex, for example an scFv binding to CD3 (TCR, T-cell receptor) to stimulate T cell activation; and a T cell receptor signaling domain, for example a CD4 transmembrane and intracellular domain to amplify T cell activation. By stimulating T cell activation through the TCR, TACs were engineered to work with the T cell's essential molecular machinery.

[0290] Antibody coupled T cell receptors are another approach to T cell targeting. ACTRs are a hybrid approach to CARs and the established monoclonal antibody oncology therapeutics. ACTRs are composed of a typical CAR construct that can bind the heavy chain of an antibody through a high-affinity variant of the Fc receptor CD16. ACTR-T cells can target tumours by binding a ligand targeted to a specific cancer antigen. T cell activation is performed by the CAR module.

[0291] Bispecific T cell exchangers (BiTEs) are bispecific antibodies that can bind the TCR of T cells and target tumour cells through two modules: a cancer targeting ligand; and a CD3-binding scFv domain that bridges T cells to the tumor. In some embodiments, bi-specific fusion proteins comprising a superkine may also be referred to as Bi-functional SuperKines as ImmunoTherapies (BiSKITs). In some embodiments, novel interleukin super-agonists, partial agonists, and super-antagonists are designed using directed evolution. In some embodiments, rational approaches are used to further design long-acting IL-2, IL-4, and IL-13 Superkines without masking functional activity.

[0292] In some embodiments, a platform using directed evolution together with yeast display results in tunable superkines. In some embodiments, such platform generates an extensive library of IL-2, IL-4, and IL-13 superkines with unique properties (FIG. 55). In some embodiments, MDNA109 is an engineered version of human IL-2 showing enhanced agonist activity (FIG. 56). In some embodiments, MDNA109 family of ‘IL-2 Superkines’ have been engineered to improve PK characteristics and enhance selectivity to further improve therapeutic window (FIG. 57).

[0293] In some embodiments, MDNA11 is a ‘Beta-Only’ superkine with uniquely enhanced affinity for CD122 (FIG. 58). In some embodiments, MDNA11 preferentially stimulates immune effector cells (FIG. 59). In some embodiments, MDNA11 shows monotherapy anti-tumor efficacy and combination effect with anti-PD1 in MC38 tumor model (FIG. 60). In some embodiments, MDNA11 together with Anti-CTLA4 induces tumor clearance, protects against re-challenges, and promotes antigen-specific CD8 T-cells (FIG. 61). In some embodiments, MDNA11 induces durable and sustained proliferation and expansion of immune effector cells but not T_{regs} in NHP (FIG. 62).

[0294] In some embodiments, Superkine Targeted with Antibody (STAb) enhances accumulation in tumors (FIG. 63). In some embodiments, STAb overcomes checkpoint resistance and ‘cold’ tumors (FIG. 64).

[0295] In some embodiments, IL-4 and IL-13 receptors play a role in cancer (FIG. 65). In some embodiments, MDNA55 is an empowered Superkine with a potent payload targeting Type 2 IL-4R expressed on tumor cells and tumor microenvironment (MDSC and TAM). In some embodiments, MDNA413 is a super-antagonist blocking IL-4 and IL-13 signaling via type 2 IL-4R to suppress MDSC and TAM. In some embodiments, MDNA 132 is a superkine that selectively targets decoy IL-13Rα2 that is overexpressed on solid tumors. In some embodiments, MDNA132 is an engineered version of human IL-13 targeting tumor specific antigen (FIG. 66). In some embodiments, MDNA132 plays a role in localizing T-cell engager and checkpoint inhibitor to tumors (FIG. 67).

[0296] In some embodiments, MDNA413 is an engineered version of human IL-13 showing antagonist activity (FIG. 68). In some embodiments, Fc-MDNA413 inhibits IL-4 and IL-13 induced signaling and function (FIG. 69).

[0297] In some embodiments, a dual specific cytokine (DUCK Cancer) is MDNA109FEAA-Fc-MDNA413 and has a mechanism of action as shown in FIG. 70.

[0298] Targeted therapies have been developed against IL13Rα2, including bacterial toxins conjugated to IL13, nanoparticles, oncolytic virus, as well as immunotherapies using monoclonal antibodies, IL13Rα2-pulsed dendritic cells, and IL13Rα2-targeted chimeric antigen receptors (see Kahlon et al. (2004) Cancer Research. 64(24):9160-9166; Kong et al. (2012) Clinical Cancer Research. 18(21):5949-5960; Thaci et al. (2014) Neuro-Oncology; and clinical trials NCT02208362, NCT00730613 and NCT01082926). In some emnodiemtns, these targeted therapies can be used to deliver the IL-2 muteins to the tumor.

[0299] Biologicals that provide for selective alteration of IL-13 activity are of interest for a number of therapeutic purposes, including the treatment of certain cancers with by engineering of T cell specificities. The present invention addresses this issue.

[0300] Methods and compositions are provided for enhancing anti-tumor immune effector cells, e.g. T cells, NK cells, etc. with targeted compositions, including without limitation chimeric antigen receptors (CARs); T cell antigen couplers (TACs); antibody coupled T cell receptors (ACTRs); and bispecific T cell exchangers (BiTEs), where an IL-13 or IL-4 superkine provides the target-specific ligand. In further embodiments, the immune effector cell expresses an IL-2 mutein.

[0301] Immune cell targeting or expression constructs comprising IL-2 superkine sequences are provided and can include any IL-2 sequence as described herein. Superkines are useful for targeting immune cells to cells, e.g. tumor cells, expressing the at least one receptor. In some embodiments, the IL-2 mutein is any IL-2 mutein or variant disclosed herein. In some embodiments, the IL-2 mutein sequence is 90% identical to any one of SEQ ID NO:2 or SEQ ID NO:6 through SEQ ID NO:10 or SEQ ID NO:16. In some embodiments, the IL-2 mutein incudes any one of 5-1 SEQ ID NO:5; 5-2 SEQ ID NO:6; 6-6 SEQ ID NO:7; A2 SEQ ID NO:8; B1 SEQ ID NO:9; B11 SEQ ID NO: 10; C5 SEQ ID NO:11; D10 SEQ ID NO: 12; E10 SEQ ID NO: 13; G8 SEQ ID NO:14; H4 SEQ ID NO: 15; and H9 SEQ ID NO: 16. In some embodiments, the substitutions in the IL-2 mutein comprise L80F, R81D, L85V, I86V, and I92F, numbered in accordance with wild-type human IL-2 of SEQ ID NO:2.

[0302] The IL-2 superkine or mutein component of the construct may be at least about 50 amino acids in length, at least about 75, at least about 100, at least about 110, at least about 115 amino acids in length, up to the full-length of the wild-type protein at the transmembrane domain, i.e. about 116 amino acids in length. For example, the superkine or mutein may be fused to the hinge, transmembrane or signaling domains of a CAR. Exemplary polypeptide sequences are provided

[0303] Included as superkines or muteins are amino acid and nucleic acid coding sequences that are 90%, 95%, 98% or 99% identical to these sequences, longer sequences that comprise those sequences but also include additional nucleotides at the 3′ or 5′ end, for example any number of additional nucleotides or codons, such as 3, 6, 9, 12 or more nucleotides, or up to about 12, 20, 50 or 100 additional nucleotides, and any sequence that encodes the same amino acid sequence as these nucleic acids due to the degeneracy of the genetic code. In particular, sequences that are codon optimized (CO) for expression by the desired host are contemplated as part of the invention. In some embodiments, the amino acid sequence is 90% identical. In some embodiments, the amino acid sequence is 95% identical. In some embodiments, the amino acid sequence is 98% identical. In some embodiments, the amino acid sequence is 99% identical. In some embodiments, the polypeptide is linked to an IL-2 superkine immune cell targeting or expression construct. In some embodiments, an IL-2 superkine immune cell targeting or expression construct comprises one or more signaling domains derived from CD3-ζ, CD28, DAP10, OX-40, ICOS and CD137. In some embodiments, an IL-2 superkine immune cell targeting or expression construct or expression comprises one or more signaling domains derived from CD3-ζ. In some embodiments, an IL-2 superkine immune cell targeting or expression construct comprises one or more signaling domains derived from CD28. In some embodiments, an IL-2 superkine immune cell targeting or expression construct comprises one or more signaling domains derived from DAP10. In some embodiments, an IL-2 superkine immune cell targeting or expression construct comprises one or more signaling domains derived from OX-40. In some embodiments, an IL-2 superkine immune cell targeting or expression construct comprises one or more signaling domains derived from CD137. In some embodiments, an IL-2 superkine immune cell targeting or expression construct comprises an IL-2 variant/IL-2 superkine including those provided herein. In some embodiments, an IL-2superkine immune cell targeting or expression construct comprises an IL-2 variant/IL-2 superkine including those provided in SEQ ID NO:2 through SEQ ID NO:38.

[0304] 1. NK Cells

[0305] In some embodiments the immune cells are natural killer (NK) cells. NK cells recognize infected or transformed cells through multiple cell surface receptors including NKG2D, CD16, and natural cytotoxicity receptors (NCRs) such as NKp44, NKp46, and NKp30. These receptors activate signaling adapter proteins such as DAP10, DAP12, and CD3ζ, which contain immuno-tyrosine activation motifs (ITAMs) that initiate the release of cytolytic granules containing perforin and granzymes, as well as mediate production and release of cytokines and chemokines such as IFN-γ and TNF-α. Importantly, NK cell-mediated cytotoxicity does not rely on the presentation of self HLA. Therefore, NK cells hold significant clinical interest as a cell-based therapy for cancer because of their ability to be used in an allogeneic setting and potentially provide an off-the-shelf cellular product.

[0306] Natural killer cells provide an alternative to the use of T cells for adoptive immunotherapy since they do not require HLA matching, so can be used as allogeneic effector cells. Clinical trials of adoptively transferred allogeneic NK cells demonstrate these cells can survive in patients for several weeks to months. Additionally, expression of CARs in NK cells allow these cells to more effectively kill solid tumors that are often resistant to NK cell-mediated activity compared to hematologic malignancies (especially acute myelogenous leukemia) that are typically more NK cell-sensitive. CARs useful in NK cell targeting include, for example, first generation CAR constructs that contain CD3ζ as the sole signaling domain. Second and third generation CARs are also useful in NK cells. In some embodiments the ectodomain of NKG2D, an NK cell activation receptor, is linked directly to CD3ζ.

[0307] NK cells for modification include cell lines, or peripheral blood NK cells, which can be isolated from donors through simple blood draws or by apheresis if larger numbers of cells are needed. Activated PB-NK cells express a wider range of activating receptors, such as CD16, NKp44, and NKp46 as well as KIRs, which play an important role in NK cell licensing. In addition, PB-NK cells can be given without irradiating the cells so have the ability to expand in vivo. Another source of NK cells suitable for CAR expression are NK cells derived from human pluripotent stem cells—both induced pluripotent stem cells (iPSCs) or human embryonic stem cells (hESCs). These NK cells display a similar phenotype to PB-NK cells, and hESC/iPSC-NK cells can be grown on a clinical scale.

[0308] 2. Chimerica Antigen Receptors (CARs)

[0309] In addition to the superkine sequence, CARs contain the signaling domain for CD3ζ and the signaling domains of one or more costimulatory receptors that further promote the recycling, survival and/or expansion of immune cells expressing the CARs. The signaling domains of the costimulatory receptors are the intracellular portions of each receptor protein that generate the activating signal in the cell. Examples are amino acids 180-220 of the native CD28 molecule and amino acids 214-255 of the native 4-1BB molecule.

[0310] Examples of suitable hinge and transmembrane regions to link the superkine to the signaling region may include without limitation the constant (Fc) regions of immunoglobins, human CD8a, and artificial linkers that serve to move the targeting moiety away from the cell surface for improved access to and binding on target cells. Examples of suitable transmembrane domains include the transmembrane domains of the leukocyte CD markers, preferably that of CD4 or CD28. Examples of intracellular receptor signaling domains include the T cell antigen receptor complex, preferably the zeta chain of CD3, however any transmembrane region sufficient to anchor the CAR in the membrane can be used. Persons of skill are aware of numerous transmembrane regions and the structural elements (such as lipophilic amino acid regions) that produce transmembrane domains in numerous membrane proteins and therefore can substitute any convenient sequence. T cell costimulatory signaling receptors suitable for improving the function and activity of CAR-expressing cells include, but are not limited to, CD28, CD137, and OX-40.

[0311] Signaling via CD28 is required for IL2 production and proliferation, but does not play a primary role in sustaining T cell function and activity. CD137 (a tumor necrosis factor-receptor family member expressed following CD28 activation) and OX-40 are involved in driving long-term survival of T cells, and accumulation of T cells. The ligands for these receptors typically are expressed on professional antigen presenting cells such as dendritic cells and activated macrophages, but not on tumor cells. Expressing a CAR that incorporates CD28 and/or 4-1BB signaling domains in CD4⁺ T cells enhances the activity and anti-tumor potency of those cells compared to those expressing a CAR that contains only the CD3ζ signaling domain, which constructs may be referred to as second or third generation CARs.

[0312] Included as CAR constructs of interest are tandem CARs, e.g. see Hegde et al. (2016) J. Clin. Invest 126(8):3036-3052, herein specifically incorporated by reference. In such constructs a binding moiety for a tumor specific antigen is combined in tandem with an IL-13 superkine. The binding moiety may be, for example, an scFv specific for a tumor cell antigen, including without limitation HER-2, EGFR, CD20, etc. as known in the art.

[0313] In various embodiments, the antigen binding domain binds to an antigen on a target cell, e.g., a cancer cell. The antigen binding domain can bind an antigen, such as but not limited to a tumor target antigen. In some case, the antigen binding domain binds one or more antigens. Exemplary antigen binding domains can bind to an antigen including, but not limited to, D19; CD123; CD22; CD30; CD171; CS-1 (also referred to as CD2 subset 1, CRACC, SLAMF7, CD319, and 19A24); C-type lectin-like molecule-1 (CLL-1 or CLECL1); CD33; epidermal growth factor receptor variant III (EGFRvIII); ganglioside G2 (GD2); ganglioside GD3; TNF receptor family member B cell maturation (BCMA); Tn antigen ((Tn Ag) or (GalNAcu Ser/Thr)); prostate-specific membrane antigen (PSMA); Receptor tyrosine kinase-like orphan receptor 1 (ROR1); Fms-Like Tyrosine Kinase 3 (FLT3); Tumor-associated glycoprotein 72 (TAG72); CD3ε; CD44v6; Carcinoembryonic antigen (CEA); Epithelial cell adhesion molecule (EPCAM); B7H3 (CD276); KIT (CD117); Interleukin-13 receptor subunit alpha-2 (IL-13Rα2 or CD213A2); Mesothelin; Interleukin 11 receptor alpha (IL-IIRa); prostate stem cell antigen (PSCA); Protease Serine 21 (Testisin or PRSS21); vascular endothelial growth factor receptor 2 (VEGFR2); Lewis(Y) antigen; CD24; Platelet-derived growth factor receptor beta (PDGFR-beta); Stage-specific embryonic antigen-4 (SSEA-4); CD20; Folate receptor alpha; Receptor tyrosine-protein kinase ERBB2 (Her2/neu); Mucin 1, cell surface associated (MUC1); epidermal growth factor receptor (EGFR); neural cell adhesion molecule (NCAM); Prostase; prostatic acid phosphatase (PAP); elongation factor 2 mutated (ELF2M); Ephrin B2; fibroblast activation protein alpha (FAP); insulin-like growth factor 1 receptor (IGF-I receptor), carbonic anhydrase IX (CAIX); Proteasome (Prosome, Macropain) Subunit, Beta Type, 9 (LMP2); glycoprotein 100 (gp 100); oncogene fusion protein consisting of breakpoint cluster region (BCR) and Abelson murine leukemia viral oncogene homolog 1 (Abl) (bcr-abl); tyrosinase; ephrin type-A receptor 2 (EphA2); Fucosyl GM1; sialyl Lewis adhesion molecule (sLe); ganglioside GM3 (aNeu5Ac(2-3)bDGalp(1-4)bDGlcp(1-1)Cer); transglutaminase 5 (TGS5); high molecular weight-melanoma-associated antigen (HMWMAA); o-acetyl-GD2 ganglioside (OAcGD2); Folate receptor beta; tumor endothelial marker 1 (TEM1/CD248); tumor endothelial marker 7-related (TEM7R); claudin 6 (CLDN6); thyroid stimulating hormone receptor (TSHR); G protein-coupled receptor class C group 5, member D (GPRC5D); chromosome X open reading frame 61 (CXORF61); CD97; CD179a; anaplastic lymphoma kinase (ALK); Polysialic acid; placenta-specific 1 (PLAC1); hexasaccharide portion of globoH glycoceramide (GloboH); mammary gland differentiation antigen (NY-BR-1); uroplakin 2 (UPK2); Hepatitis A virus cellular receptor 1 (HAVCR1); adrenoceptor beta 3 (ADRB3); pannexin 3 (PANX3); G protein-coupled receptor 20 (GPR20); lymphocyte antigen 6 complex, locus K 9 (LY6K); Olfactory receptor 51E2 (OR51E2); TCR Gamma Alternate Reading Frame Protein (TARP); Wilms tumor protein (WT1); Cancer/testis antigen 1 (NY-ESO-1); Cancer/testis antigen 2 (LAGE-1a); Melanoma-associated antigen 1 (MAGE-A1); ETS translocation-variant gene 6, located on chromosome 12p (ETV6-AML); sperm protein 17 (SPA17); X Antigen Family, Member 1A (XAGE1); angiopoietin-binding cell surface receptor 2 (Tie 2); melanoma cancer testis antigen-1 (MAD-CT-1); melanoma cancer testis antigen-2 (MAD-CT-2); Fos-related antigen 1; tumor protein p53 (p53); p53 mutant; prostein; surviving; telomerase; prostate carcinoma tumor antigen-1 (PCTA-1 or Galectin 8), melanoma antigen recognized by T cells 1 (MelanA or MART 1); Rat sarcoma (Ras) mutant; human telomerase reverse transcriptase (hTERT); sarcoma translocation breakpoints; melanoma inhibitor of apoptosis (ML-IAP); ERG (transmembrane protease, serine 2 (TMPRSS2) ETS fusion gene); N-Acetyl glucosaminyl-transferase V (NA17); paired box protein Pax-3 (PAX3); androgen receptor; Cyclin B1; v-myc avian myelocytomatosis viral oncogene neuroblastoma derived homolog (MYCN); Ras Homolog Family Member C (RhoC); Tyrosinase-related protein 2 (TRP-2); cytochrome P450 1B1 (CYP1B1); CCCTC-Binding Factor (Zinc Finger Protein)-Like (BORIS or Brother of the Regulator of Imprinted Sites), Squamous Cell Carcinoma Antigen Recognized By T Cells 3 (SART3); Paired box protein Pax-5 (PAX5); proacrosin binding protein sp32 (OY-TES1); lymphocyte-specific protein tyrosine kinase (LCK); A kinase anchor protein 4 (AKAP-4); synovial sarcoma, X breakpoint 2 (SSX2); Receptor for Advanced Glycation Endproducts (RAGE-1); renal ubiquitous 1 (RU1); renal ubiquitous 2 (RU2); legumain; human papilloma virus E6 (HPV E6); human papilloma virus E7 (HPV E7); intestinal carboxyl esterase; heat shock protein 70-2 mutated (mut hsp70-2); CD79a; CD79b; CD72; Leukocyte-associated immunoglobulin-like receptor 1 (LAIR1); Fc fragment of IgA receptor (FCAR or CD89); Leukocyte immunoglobulin-like receptor subfamily A member 2 (LILRA2); CD300 molecule-like family member f (CD300LF); C-type lectin domain family 12 member A (CLECi2A); bone marrow stromal cell antigen 2 (BST2); EGF-like module-containing mucin-like hormone receptor-like 2 (EMR2); lymphocyte antigen 75 (LY75); Glypican-3 (GPC3); Fc receptor-like 5 (FCRL5); and immunoglobulin lambda-like polypeptide 1 (IGLL1).

[0314] In some embodiments, the antigen binding domain comprises a monoclonal antibody, a polyclonal antibody, a synthetic antibody, a human antibody, a humanized antibody, a non-human antibody, a nanobody, a single-chain variable fragment (scFv), F(ab′)2, Fab′, Fab, Fv, and the like. The antigen binding domain can be linked to the transmembrane domain of the CAR. In some embodiments, a nucleic acid encoding the antigen binding domain is operably linked to a nucleic acid encoding a transmembrane domain of the CAR.

[0315] In some embodiments, the transmembrane domain can be derived from a membrane-bound or transmembrane protein. In certain embodiments, the transmembrane domain comprises one or more, e.g., 1, 2, 3, 4, 5, 6, 7, 8 or more amino acid modifications (e.g., substitutions, insertions, and deletions) compared to the wild-type amino acid sequence of the transmembrane domain of the membrane-bound or transmembrane protein. Non-limiting examples of a transmembrane domain of a CAR include at least the transmembrane region(s) of the alpha, beta or zeta chain of the T-cell receptor, CD28, CD3 epsilon (CD34), CD45, CD4, CD5, CD8, CD9, CD16, CD22, CD33, CD37, CD64, CD80, CD86, CD134, CD137, CD154, or an erythropoietin receptor. In some embodiments, the transmembrane domain includes a human immunoglobulin (Ig) hinge region, e.g., an IgG4Fc hinge. In other embodiments, the transmembrane domain is a recombinant or synthetic domain comprising hydrophobic amino acid residues (e.g., leucine and valine). In some cases, the transmembrane domain includes a phenylalanine, tryptophan and valine at one or both ends of the domain.

[0316] The transmembrane domain links the antigen binding domain to the intracellular signaling domain of the CAR. In some embodiments, the nucleic acid encoding the antigen binding domain is operably linked to the nucleic acid encoding the transmembrane domain that is operably linked to the nucleic acid encoding the intracellular signaling domain.

[0317] In some embodiments, the intracellular signaling domain of a CAR comprises a signal activation or signal transduction domain. As such, an intracellular signaling domain includes any portion of an intracellular signaling domain of a protein sufficient to transduce or transmit a signal, e.g., an activation signal or to mediate a cellular response within a cell. Non-limiting examples include TCR, CD2, CD3 zeta, CD3 gamma, CD3 delta, CD3 epsilon, CD7, CD27, CD86, common FcR gamma, FcR beta, CD79a, CD79b, Fcgamma RIIa, DAP10, DAP12, T cell receptor (TCR), CD27, CD28, 4-1BB (CD137), OX40, CD30, CD40, PD-1, ICOS, lymphocyte function-associated antigen-1 (LFA-1), CD2, CD7, LIGHT, NKG2C, B7-H3, a ligand that specifically binds with CD83, CDS, ICAM-1, GITR, BAFFR, HVEM (LIGHTR), SLAMF7, NKp80 (KLRF1), CD127, CD160, CD19, CD4, CD8alpha, CD8 beta, IL2R beta, IL2R gamma, IL7R alpha, ITGA4, VLA1, CD49a, ITGA4, IA4, CD49D, ITGA6, VLA-6, CD49f, ITGAD, CD11d, ITGAE, CD103, ITGAL, CD11a, LFA-1, ITGAM, CD11b, ITGAX, CD11c, ITGB1, CD29, ITGB2, CD18, LFA-1, ITGB7, TNFR2, TRANCE/RANKL, DNAM1 (CD226), SLAMF4 (CD244, 2B4), CD84, CD96 (Tactile), CEACAMI, CRTAM, Ly9 (CD229), CD160 (BY55), PSGL1, CD100 (SEMA4D), CD69, SLAMF6 (NTB-A, Ly108), SLAM (SLAMFI, CD150, IPO-3), BLAME (SLAMF8), SELPLG (CD162), LTBR, LAT, GADS, SLP-76, PAG/Cbp, NKp44, NKp30, NKp46, NKG2D, any derivative, variant, or fragment thereof. In certain embodiments, the intracellular signaling domain comprises an intracellular domain of a co-stimulatory molecule such as from CD3, CD27, CD28, CD127, ICOS, 4-1BB (CD137), PD-1, T cell receptor (TCR), any derivative thereof, or any variant thereof. In some embodiments, the intracellular signaling domain of the CAR is selected from the group consisting of a MHC class I molecule, a TNF receptor protein, an Immunoglobulin-like protein, a cytokine receptor, an integrin, a signaling lymphocytic activation molecule (SLAM protein), an activating NK cell receptor, BTLA, a Toll ligand receptor, OX40, CD2, CD7, CD27, CD28, CD30, CD40, CDS, ICAM-1, LFA-1 (CD11a/CD18), 4-1BB (CD137), B7-H3, CDS, ICAM-1, ICOS (CD278), GITR, BAFFR, LIGHT, HVEM (LIGHTR), KIRDS2, SLAMF7, NKp80 (KLRF1), NKp44, NKp30, NKp46, CD19, CD4, CD8alpha, CD8beta, IL2R beta, IL2R gamma, IL7R alpha, ITGA4, VLA1, CD49a, ITGA4, IA4, CD49D, ITGA6, VLA-6, CD49f, ITGAD, CD11d, ITGAE, CD103, ITGAL, CD11a, LFA-1, ITGAM, CD11b, ITGAX, CD11c, ITGB1, CD29, ITGB2, CD18, LFA-1, ITGB7, NKG2D, NKG2C, TNFR2, TRANCE/RANKL, DNAM1 (CD226), SLAMF4 (CD244, 2B4), CD84, CD96 (Tactile), CEACAMI, CRTAM, Ly9 (CD229), CD160 (BY55), PSGL1, CD100 (SEMA4D), CD69, SLAMF6 (NTB-A, Ly108), SLAM (SLAMFI, CD150, IPO-3), BLAME (SLAMF8), SELPLG (CD162), LTBR, LAT, GADS, SLP-76, PAG/Cbp, CD19a, and a ligand that specifically binds with CD83.

[0318] 3. Bites

[0319] Bi-specific T-cell engagers (BiTEs) are fusion proteins comprising an IL-13 superkine fused to an antibody variable region that specifically binds to CD3. In some embodiments the antibody variable region in a single-chain variable fragments (scFvs). The superkine may be fused to the variable region through a linker. An Fc region is optionally provided.

[0320] 4. TACs

[0321] A TAC construct comprises an IL-2 superkine fused to a ligand that binds a protein associated with the TCR complex; fused to a T cell receptor signaling domain polypeptide. The domains may be separated by linkers. The protein associated with the TCR complex may be CD3. The ligand that binds a protein associated with the TCR complex may be a single chain antibody. The ligand that binds a protein associated with the TCR complex may be UCHT1, or a variant thereof. The T cell receptor signaling domain polypeptide may comprise a cytosolic domain and a transmembrane domain. The cytosolic domain may be a CD4 cytosolic domain and the transmembrane domain is a CD4 transmembrane domain.

[0322] 5. ACTRs

[0323] ACTRs are a hybrid approach to CARs and the established monoclonal antibody oncology therapeutics. ACTRs are composed of a typical CAR construct that can bind the heavy chain of an antibody through a high-affinity variant of the Fc receptor CD16. A superkine is fused to a moiety recognized by the CAR, which may include, without limitation, an Fc region of an antibody with high affinity for CD16.

[0324] An immune cell targeting or expression construct coding sequence can be produced by any means known in the art, including recombinant DNA techniques. Nucleic acids encoding the several regions of the chimeric receptor can be prepared and assembled into a complete coding sequence by standard techniques of molecular cloning known in the art (genomic library screening, PCR, primer-assisted ligation, site-directed mutagenesis, etc.) as is convenient. The resulting coding region may be inserted into an expression vector and used to transform a suitable expression host cell line, e.g. a population of allogeneic or autologous T lymphocytes, allogeneic or autologous NK cells, including primary cultures, cell lines, iPSC derived cells, etc. The methods can be used on cells in vitro (e.g., in a cell-free system), in culture, e.g. in vitro or ex vivo. For example, IL-2 superkine CAR-expressing cells can be cultured and expanded in vitro in culture medium.

[0325] An non-IL-2 superkine immune cell targeting or expression construct can also be used specifically direct immune cells to target specific tumor cells. Anti-tumor effector cells, e.g. CD4⁺ or CD8⁺ effector T cells, are generated to be re-directed to recognize such tumor cells by introducing into the T cells an superkine immune cell targeting or expression construct comprising one or more signaling domains derived from CD3-ζ, CD28, DAP10, OX-40, ICOS and CD137. In some embodiments, the cells can further comprise a transgene capable of expressing an IL-2 mutein as described herein. An IL-2 superkine immune cell targeting or expression construct can specifically direct immune cells to target IL-2R expressing cell, including tumor cells. Anti-tumor effector cells, e.g. CD4⁺ or CD8⁺ effector T cells, are generated to be re-directed to recognize such tumor cells by introducing into the T cells an IL-2 superkine immune cell targeting or expression construct comprising one or more signaling domains derived from CD3-ζ, CD28, DAP10, OX-40, ICOS and CD137.

[0326] The IL-2 superkine immune cell targeting or expression construct is infected or transfected into human immune cells, e.g. using a non-viral plasmid vector and electroporation methods; a viral vector and infection methods, etc. as known in the art. A CAR comprising co-stimulatory signaling domains may enhance the duration and/or retention of anti-tumor activity in a manner that can significantly improve the clinical efficacy of adoptive therapy protocols. CD4⁺ and CD8⁺ T cell effector functions, and NK cell functions can be triggered via these receptors, therefore these cell types are contemplated for use with the invention. CD8⁺ T cells expressing the IL13 superkine CARs of this invention may be used to lyse target cells and to produce IL-2 in the presence of target cells, among the other functions of these cells. Expression of the appropriate costimulatory CAR in either or both CD4⁺ and CD8⁺ T cells is used to provide the most effective population of cells for adoptive immunotherapy, consisting therefore of either or both professional helper and killer T cells that exhibit enhanced and/or long term viability and anti-tumor activity. In some embodiments, an IL-2 superkine immune cell targeting or expression construct comprises an IL-2 variant/IL-2 superkine including those provided in FIG. 2. In some embodiments, an IL-2 superkine immune cell targeting or expression construct comprises an IL-2 variant/IL-2 superkine including any of those provided herein.

[0327] Polypeptides of the present invention can be further modified, e.g., joined to a wide variety of other oligopeptides or proteins for a variety of purposes. For example, post-translationally modified, for example by prenylation, acetylation, amidation, carboxylation, glycosylation, pegylation, etc. Such modifications can also include modifications of glycosylation, e.g. those made by modifying the glycosylation patterns of a polypeptide during its synthesis and processing or in further processing steps; e.g. by exposing the polypeptide to enzymes which affect glycosylation, such as mammalian glycosylating or deglycosylating enzymes.

[0328] Methods which are well known to those skilled in the art can be used to construct T cell targeting construct expression vectors containing coding sequences and appropriate transcriptional/translational control signals. These methods include, for example, in vitro recombinant DNA techniques, synthetic techniques and in vivo recombination/genetic recombination. Alternatively, RNA capable of encoding the polypeptides of interest may be chemically synthesized. One of skill in the art can readily utilize well-known codon usage tables and synthetic methods to provide a suitable coding sequence for any of the polypeptides of the invention. The nucleic acids may be isolated and obtained in substantial purity. Usually, the nucleic acids, either as DNA or RNA, will be obtained substantially free of other naturally-occurring nucleic acid sequences, generally being at least about 50%, usually at least about 90% pure and are typically “recombinant,” e.g., flanked by one or more nucleotides with which it is not normally associated on a naturally occurring chromosome. The nucleic acids of the invention can be provided as a linear molecule or within a circular molecule, and can be provided within autonomously replicating molecules (vectors) or within molecules without replication sequences. Expression of the nucleic acids can be regulated by their own or by other regulatory sequences known in the art. The nucleic acids of the invention can be introduced into suitable host cells using a variety of techniques available in the art.

[0329] According to the present invention, immune cell targeting or expression construct vectors and immune cell targeting or expression construct modified cells can be provided in pharmaceutical compositions suitable for therapeutic use, e.g. for human treatment. In some embodiments, pharmaceutical compositions of the present invention include one or more therapeutic entities of the present invention or pharmaceutically acceptable salts, esters or solvates thereof. In some other embodiments, pharmaceutical compositions of the present invention include one or more therapeutic entities of the present invention in combination with another therapeutic agent, e.g., another anti-tumor agent.

[0330] Therapeutic entities of the present invention are often administered as pharmaceutical compositions comprising an active therapeutic agent and another pharmaceutically acceptable excipient. Such formulations can include one or more non-toxic pharmaceutically acceptable carriers, diluents, excipients and/or adjuvants. The preferred form depends on the intended mode of administration and therapeutic application. The compositions can also include, depending on the formulation desired, pharmaceutically-acceptable, non-toxic carriers or diluents, which are defined as vehicles commonly used to formulate pharmaceutical compositions for animal or human administration. The diluent is selected so as not to affect the biological activity of the combination. Examples of such diluents are distilled water, physiological phosphate-buffered saline, Ringer's solutions, dextrose solution, and Hank's solution. In addition, the pharmaceutical composition or formulation may also include other carriers, adjuvants, or nontoxic, nontherapeutic, nonimmunogenic stabilizers and the like.

[0331] In still some other embodiments, pharmaceutical compositions of the present invention can also include large, slowly metabolized macromolecules such as proteins, polysaccharides such as chitosan, polylactic acids, polyglycolic acids and copolymers (such as latex functionalized Sepharose™, agarose, cellulose, and the like), polymeric amino acids, amino acid copolymers, and lipid aggregates (such as oil droplets or liposomes).

[0332] The maximum tolerated dose (MTD) of CAR immune cells may be determined during clinical trial development, for example at up to about 10⁴ T cells/kg of body weight, up to about 10⁵ cells/kg of body weight, up to about 10⁶ cells/kg of body weight, up to about 5×10⁶ cells/kg of body weight, up to about 10⁷ cells/kg of body weight, up to about 5×10⁷ cells/kg of body weight, or more, as empirically determined. In some embodiments, the maximum tolerated dose (MTD) of CAR immune cells is up to about 10⁴ T cells/kg of body weight. In some embodiments, the maximum tolerated dose (MTD) of CAR immune cells is up to about 10⁵ T cells/kg of body weight. In some embodiments, the maximum tolerated dose (MTD) of CAR immune cells is up to about 10⁶ T cells/kg of body weight. In some embodiments, the maximum tolerated dose (MTD) of CAR immune cells is up to about 10⁷ T cells/kg of body weight. In some embodiments, the maximum tolerated dose (MTD) of CAR immune cells is up to about 5×10⁶ T cells/kg of body weight. In some embodiments, the maximum tolerated dose (MTD) of CAR immune cells is up to about 5×10⁷ T cells/kg of body weight.

[0333] Toxicity of the cells described herein can be determined by standard pharmaceutical procedures in cell cultures or experimental animals, e.g., by determining the LD₅₀ (the dose lethal to 50% of the population) or the LD₁₀₀ (the dose lethal to 100% of the population). The dose ratio between toxic and therapeutic effect is the therapeutic index. The data obtained from these cell culture assays and animal studies can be used in formulating a dosage range that is not toxic for use in human. The dosage of the described herein lies preferably within a range of circulating concentrations that include the effective dose with little or no toxicity. The dosage can vary within this range depending upon the dosage form employed and the route of administration utilized. The exact formulation, route of administration and dosage can be chosen by the individual physician in view of the patient's condition.

[0334] After a dose escalation phase, patients in the expansion cohort are treated with immune cells at the MTD. An exemplary treatment regime entails administration once every two weeks or once a month or once every 3 to 6 months. Therapeutic entities of the present invention are usually administered on multiple occasions. Intervals between single dosages can be weekly, monthly or yearly. Intervals can also be irregular as indicated by measuring blood levels of the therapeutic entity in the patient.

[0335] In prophylactic applications, e.g. to maintain remission in a patient, a relatively low dosage may be administered at relatively infrequent intervals over a long period of time. Some patients continue to receive treatment for the rest of their lives. In other therapeutic applications, a relatively high dosage at relatively short intervals is sometimes required until progression of the disease is reduced or terminated, and preferably until the patient shows partial or complete amelioration of symptoms of disease. Thereafter, the patent can be administered a prophylactic regime.

[0336] Examples of additional therapeutic agents that can be coadministered and/or coformulated with an immune cell targeting or expression construct include: anti-proliferative, or cytoreductive therapy, which is used therapeutically to eliminate tumor cells and other undesirable cells in a host, and includes the use of therapies such as delivery of ionizing radiation, and administration of chemotherapeutic agents. Chemotherapeutic agents are well-known in the art and are used at conventional doses and regimens, or at reduced dosages or regimens, including for example, topoisomerase inhibitors such as anthracyclines, including the compounds daunorubicin, adriamycin (doxorubicin), epirubicin, idarubicin, anamycin, MEN 10755, and the like. Other topoisomerase inhibitors include the podophyllotoxin analogues etoposide and teniposide, and the anthracenediones, mitoxantrone and amsacrine. Other anti-proliferative agent interferes with microtubule assembly, e.g. the family of vinca alkaloids. Examples of vinca alkaloids include vinblastine, vincristine; vinorelbine (NAVELBINE); vindesine; vindoline; vincamine; etc. DNA-damaging agent include nucleotide analogs, alkylating agents, etc. Alkylating agents include nitrogen mustards, e.g. mechlorethamine, cyclophosphamide, melphalan (L-sarcolysin), etc.; and nitrosoureas, e.g. carmustine (BCNU), lomustine (CCNU), semustine (methyl-CCNU), streptozocin, chlorozotocin, etc. Nucleotide analogs include pyrimidines, e.g. cytarabine (CYTOSAR-U), cytosine arabinoside, fluorouracil (5-FU), floxuridine (FUdR), etc.; purines, e.g. thioguanine (6-thioguanine), mercaptopurine (6-MP), pentostatin, fluorouracil (5-FU) etc.; and folic acid analogs, e.g. methotrexate, 10-propargyl-5,8-dideazafolate (PDDF, CB3717), 5,8-dideazatetrahydrofolic acid (DDATHF), leucovorin, etc. Other chemotherapeutic agents of interest include metal complexes, e.g. cisplatin (cis-DDP), carboplatin, oxaliplatin, etc.; ureas, e.g. hydroxyurea; and hydrazines, e.g. N-methylhydrazine.

[0337] For example, ionizing radiation (IR) is used to treat about 60% of cancer patients, by depositing energy that injures or destroys cells in the area being treated, and for the purposes of the present invention may be delivered at conventional doses and regimens, or at reduced doses. Radiation injury to cells is nonspecific, with complex effects on DNA. The efficacy of therapy depends on cellular injury to cancer cells being greater than to normal cells. Radiotherapy may be used to treat every type of cancer. Some types of radiation therapy involve photons, such as X-rays or gamma rays. Another technique for delivering radiation to cancer cells is internal radiotherapy, which places radioactive implants directly in a tumor or body cavity so that the radiation dose is concentrated in a small area. A suitable dose of ionizing radiation may range from at least about 2 Gy to not more than about 10 Gy, usually about 5 Gy. A suitable dose of ultraviolet radiation may range from at least about 5 J/m² to not more than about 50 J/m², usually about 10 J/m². The sample may be collected from at least about 4 and not more than about 72 hours following ultraviolet radiation, usually around about 4 hours.

[0338] Treatment may also be combined with immunoregulatory modulating agents, including an agent that agonizes an immune costimulatory molecule, e.g. CD40, OX40, etc.; and/or (iii) an agent that antagonizes an immune inhibitory molecule, e.g. CTLA-4, PD-1, PD-L1, etc. The active agents are administered within a period of time to produce an additive or synergistic effect on depletion of cancer cells in the host. Methods of administration include, without limitation, systemic administration, intra-tumoral administration, etc.

[0339] In some embodiments, an individual cancer is selected for treatment with a combination therapy because the cancer is a cancer type that is responsive to a checkpoint inhibitor, e.g. a PD-1 antagonist, a PD-L1 antagonist, a CTLA4 antagonist, a TIM-3 antagonist, a BTLA antagonist, a VISTA antagonist, a LAG3 antagonist; etc. In some embodiments, such an immunoregulatory agent is a CTLA-4, PD1 or PDL1 antagonist, e.g. avelumab, nivolumab, pembrolizumab, ipilimumab, and the like. In some such embodiments the cancer is, without limitation, melanoma or small cell lung cancer. In some such embodiments, the cancer is a type that has a high neoantigen, or mutagenesis, burden (see Vogelstein et al. (2013) Science 339(6127):1546-1558, herein specifically incorporated by reference).

[0340] In some embodiments, an individual cancer is selected for treatment with a combination therapy of the present invention because the cancer is a cancer type that is responsive to an immune response agonist, e.g. a CD28 agonist, an OX40 agonist; a GITR agonist, a CD137 agonist, a CD27 agonist, an HVEM agonist, etc. In some embodiments, such an immunoregulatory agent is an OX40, CD137, or GITR agonist e.g. tremelimumab, and the like. In some such embodiments the cancer is, without limitation, melanoma or small cell lung cancer. In some such embodiments, the cancer is a type that has a high neoantigen, or mutagenesis, burden.

[0341] In some embodiments, the combination therapy includes an antibody known in the art which binds to PD-1 and disrupt the interaction between the PD-1 and its ligand, PD-L1, and stimulate an anti-tumor immune response. In some embodiments, the antibody or antigen-binding portion thereof binds specifically to PD-1. For example, antibodies that target PD-1 and which can find used in the present invention include, e.g., but are not limited to nivolumab (BMS-936558, Bristol-Myers Squibb), pembrolizumab (lambrolizumab, MK03475 or MK-3475, Merck), humanized anti-PD-1 antibody JS001 (ShangHai JunShi), monoclonal anti-PD-1 antibody TSR-042 (Tesaro, Inc.), Pidilizumab (anti-PD-1 mAb CT-011, Medivation), anti-PD-1 monoclonal Antibody BGB-A317 (BeiGene), and/or anti-PD-1 antibody SHR-1210 (ShangHai HengRui), human monoclonal antibody REGN2810 (Regeneron), human monoclonal antibody MDX-1106 (Bristol-Myers Squibb), and/or humanized anti-PD-1 IgG4 antibody PDR001 (Novartis). In some embodiments, the PD-1 antibody is from clone: RMP1-14 (rat IgG)-BioXcell cat #BP0146. Other suitable antibodies include anti-PD-1 antibodies disclosed in U.S. Pat. No. 8,008,449, herein incorporated by reference. In some embodiments, the antibody or antigen-binding portion thereof binds specifically to PD-L1 and inhibits its interaction with PD-1, thereby increasing immune activity. Any antibodies known in the art which bind to PD-L1 and disrupt the interaction between the PD-1 and PD-L1, and stimulates an anti-tumor immune response, are suitable for use in the combination treatment methods disclosed herein. For example, antibodies that target PD-L1 and are in clinical trials, include BMS-936559 (Bristol-Myers Squibb) and MPDL3280A (Genetech). Other suitable antibodies that target PD-L1 are disclosed in U.S. Pat. No. 7,943,743, herein incorporated by reference. It will be understood by one of ordinary skill that any antibody which binds to PD-1 or PD-L1, disrupts the PD-1/PD-L1 interaction, and stimulates an anti-tumor immune response, is suitable for use in the combination treatment methods.

[0342] In some embodiments, the combination therapy includes an antibody known in the art which binds CTLA-4 and disrupts its interaction with CD80 and CD86. Exemplary antibodies that target CTLA-4 include ipilimumab (MDX-010, MDX-101, Bristol-Myers Squibb), which is FDA approved, and tremelimumab (ticilimumab, CP-675, 206, Pfizer), currently undergoing human trials. Other suitable antibodies that target CTLA-4 are disclosed in WO 2012/120125, U.S. Pat. Nos. 6,984,720, 6,682,7368, and U.S. Patent Applications 2002/0039581, 2002/0086014, and 2005/0201994, herein incorporated by reference. It will be understood by one of ordinary skill that any antibody which binds to CTLA-4, disrupts its interaction with CD80 and CD86, and stimulates an anti-tumor immune response, is suitable for use in the combination treatment methods. In some embodiments, the combination therapy includes an antibody known in the art which binds LAG-3 and disrupts its interaction with MHC class II molecules. An exemplary antibody that targets LAG-3 is IMP321 (Immutep), currently undergoing human trials. Other suitable antibodies that target LAG-3 are disclosed in U.S. Patent Application 2011/0150892, herein incorporated by reference. It will be understood by one of ordinary skill that any antibody which binds to LAG-3, disrupts its interaction with MHC class II molecules, and stimulates an anti-tumor immune response, is suitable for use in the combination treatment methods.

[0343] In some embodiments, the combination therapy includes an antibody known in the art which binds TIM-3 and disrupts its interaction with galectin 9. Suitable antibodies that target TIM-3 are disclosed in U.S. Patent Application 2013/0022623, herein incorporated by reference. It will be understood by one of ordinary skill that any antibody which binds to TIM-3, disrupts its interaction with galectin 9, and stimulates an anti-tumor immune response, is suitable for use in the combination treatment methods.

[0344] In some embodiments, the combination therapy includes an antibody known in the art which binds 4-1BB/CD137 and disrupts its interaction with CD137L. It will be understood by one of ordinary skill that any antibody which binds to 4-1BB/CD137, disrupts its interaction with CD137L or another ligand, and stimulates an anti-tumor immune response or an immune stimulatory response that results in anti-tumor activity overall, is suitable for use in the combination treatment methods.

[0345] In some embodiments, the combination therapy includes an antibody known in the art which binds GITR and disrupts its interaction with its ligand. It will be understood by one of ordinary skill that any antibody which binds to GITR, disrupts its interaction with GITRL or another ligand, and stimulates an anti-tumor immune response or an immune stimulatory response that results in anti-tumor activity overall, is suitable for use in the combination treatment methods.

[0346] In some embodiments, the combination therapy includes an antibody known in the art which binds OX40 and disrupts its interaction with its ligand. It will be understood by one of ordinary skill that any antibody which binds to OX40, disrupts its interaction with OX40L or another ligand, and stimulates an anti-tumor immune response or an immune stimulatory response that results in anti-tumor activity overall, is suitable for use in the combination treatment methods.

[0347] In some embodiments, the combination therapy includes an antibody known in the art which binds CD40 and disrupts its interaction with its ligand. It will be understood by one of ordinary skill that any antibody which binds to CD40, disrupts its interaction with its ligand, and stimulates an anti-tumor immune response or an immune stimulatory response that results in anti-tumor activity overall, is suitable for use in the combination treatment methods.

[0348] In some embodiments, the combination therapy includes an antibody known in the art which binds ICOS and disrupts its interaction with its ligand. It will be understood by one of ordinary skill that any antibody which binds to ICOS, disrupts its interaction with its ligand, and stimulates an anti-tumor immune response or an immune stimulatory response that results in anti-tumor activity overall, is suitable for use in the combination treatment methods.

[0349] In some embodiments, the combination therapy includes an antibody known in the art which binds CD28 and disrupts its interaction with its ligand. It will be understood by one of ordinary skill that any antibody which binds to CD28, disrupts its interaction with its ligand, and stimulates an anti-tumor immune response or an immune stimulatory response that results in anti-tumor activity overall, is suitable for use in the combination treatment methods.

[0350] In some embodiments, the combination therapy includes an antibody known in the art which binds IFNα and disrupts its interaction with its ligand. It will be understood by one of ordinary skill that any antibody which binds to IFNα, disrupts its interaction with its ligand, and stimulates an anti-tumor immune response or an immune stimulatory response that results in anti-tumor activity overall, is suitable for use in the combination treatment methods.

[0351] An “anti-cancer therapeutic” is a compound, composition, or treatment (e.g., surgery) that prevents or delays the growth and/or metastasis of cancer cells. Such anti-cancer therapeutics include, but are not limited to, surgery (e.g., removal of all or part of a tumor), chemotherapeutic drug treatment, radiation, gene therapy, hormonal manipulation, immunotherapy (e.g., therapeutic antibodies and cancer vaccines) and antisense or RNAi oligonucleotide therapy. Examples of useful chemotherapeutic drugs include, but are not limited to, hydroxyurea, busulphan, cisplatin, carboplatin, chlorambucil, melphalan, cyclophosphamide, Ifosphamide, danorubicin, doxorubicin, epirubicin, mitoxantrone, vincristine, vinblastine, Navelbine® (vinorelbine), etoposide, teniposide, paclitaxel, docetaxel, gemcitabine, cytosine, arabinoside, bleomycin, neocarcinostatin, suramin, taxol, mitomycin C, Avastin, Herceptin®, flurouracil, and temozolamide and the like.

[0352] The compounds are also suitable for use with standard combination therapies employing two or more chemotherapeutic agents. It is to be understood that anti-cancer therapeutics includes novel compounds or treatments developed in the future.

[0353] The pharmaceutical compositions and/or formulations described above include one or more therapeutic entities in an amount effective to achieve the intended purpose. Thus the term “therapeutically effective dose” refers to the amount of the therapeutic entities that ameliorates the symptoms of cancer. Determination of a therapeutically effective dose of a compound is well within the capability of those skilled in the art. For example, the therapeutically effective dose can be estimated initially either in cell culture assays, or in animal models, such as those described herein. Animal models can also be used to determine the appropriate concentration range and route of administration. Such information can then be used to determine useful doses and routes for administration in other animals, including humans, using standard methods known in those of ordinary skill in the art.

[0354] Also within the scope of the invention are kits comprising the compositions of the invention and instructions for use. The kit may further contain a least one additional reagent, e.g. a chemotherapeutic drug, anti-tumor antibody, etc. Kits typically include a label indicating the intended use of the contents of the kit. The term label includes any writing, or recorded material supplied on or with the kit, or which otherwise accompanies the kit.

[0355] The invention now being fully described, it will be apparent to one of ordinary skill in the art that various changes and modifications can be made without departing from the spirit or scope of the invention. In some embodiments, the kit comprises an IL-2 superkine immune cell targeting or expression construct comprising an IL-2 variant/IL-2 superkine as described herein. In some embodiments, the kit comprises an IL-2 superkine immune cell targeting or expression construct comprising an IL-2 variant/IL-2 superkine including those provided herein. In some embodiments, an IL-2 superkine immune cell targeting or expression construct comprises an IL-2 variant/IL-2 superkine including those provided herein.

[0356] 6. Exemplary Immune Cell Targeting or Expression Construct Embodiments

[0357] An immune cell targeting or expression construct comprising: an interleukin-2 receptor β (IL-2Rβ) binding protein, wherein the equilibrium dissociation constant for the IL-2Rβ of the binding protein is less than that of wild-type human IL-2 (hIL-2); linked to an immune cell targeting or expression construct. In some embodiments, a bispecific IL-2 cytokine fusion is also an interleukin-2 receptor β (IL-2Rβ) binding protein.

[0358] In some embodiments, the immune cell targeting or expression construct exhibits a cyotoxic effect on a T-cell, for example a CD8⁺ T-cell or a CD4⁺ T-cell.

[0359] In some embodiments, the construct is a chimeric antigen receptor (CAR) and wherein the IL-2 superkine is fused to a transmembrane domain; linked to an intracellular signaling region.

[0360] In some embodiments, the intracellular signaling region comprises a CD3 signaling domain.

[0361] In some embodiments, the intracellular signaling region comprises one or more of a CD28 signaling domain, a CD137 signaling domain, an OX-40 signaling domain, an ICOS signaling domain, a DAP10 signaling domain.

[0362] In some embodiments, the construct is a T cell antigen coupler (TAC), wherein the IL-2 superkine is fused to a ligand that binds a protein associated with the TCR complex; fused to a T cell receptor signaling domain polypeptide.

[0363] In some embodiments, the protein associated with the TCR complex is CD3.

[0364] In some embodiments, the T cell receptor signaling domain polypeptide comprises CD4 cytosolic domain and CD4 transmembrane domain.

[0365] In some embodiments, the construct is an antibody coupled T cell receptors (ACTR), comprising a chimeric antigen receptor component that binds to the IL-2 superkine at a high affinity.

[0366] In some embodiments, the CAR component comprises CD16, and the IL-2 superkine is fused to an Fc sequence.

[0367] In some embodiments, the construct is a bispecific T cell exchanger (BiTE) comprising an IL-2 superkine fused to a variable region of an antibody that binds to a component of a T cell receptor.

[0368] In some embodiments, the BiTE component of a T cell receptor is CD3.

[0369] In some embodiments, the IL-2Rβ binding protein comprises the following amino acid substitutions: L80F, R81D, L85V, I86V, and I92F, numbered in accordance with wild-type hIL-2.

[0370] In some embodiments, the nucleic acid encoding and IL-2 described herein is provided. In some embodiments, the vector comprising the nucleic acid is provided.

[0371] In some embodiments, a T cell comprising a construct according to any of the above is provided. In some embodiments, an NK cell comprising a construct according to any of the above is provided. In some embodiments, the T cell is a CD4⁺ T cell. In some embodiments, the T cell is a CD8⁺ T cell.

[0372] Also provide are an isolated population of immune cells described above. Also provided are pharmaceutical formulations comprising the immune cell population described above.

[0373] H. Expression of Mutant IL-2 Gene Products

[0374] The nucleic acid molecules described above can be contained within a vector that is capable of directing their expression in, for example, a cell that has been transduced with the vector. Accordingly, in addition to the subject IL-2 muteins and/or bispecific IL-2 cytokine fusions, expression vectors containing a nucleic acid molecule encoding a subject IL-2 mutein and cells transfected with these vectors are among the preferred embodiments.

[0375] It should of course be understood that not all vectors and expression control sequences will function equally well to express the DNA sequences described herein. Neither will all hosts function equally well with the same expression system. However, one of skill in the art may make a selection among these vectors, expression control sequences and hosts without undue experimentation. For example, in selecting a vector, the host must be considered because the vector must replicate in it. The vector's copy number, the ability to control that copy number, and the expression of any other proteins encoded by the vector, such as antibiotic markers, should also be considered. For example, vectors that can be used include those that allow the DNA encoding the IL-2 muteins to be amplified in copy number. Such amplifiable vectors are well known in the art. They include, for example, vectors able to be amplified by DHFR amplification (see, e.g., Kaufman, U.S. Pat. No. 4,470,461, Kaufman and Sharp, “Construction of a Modular Dihydrafolate Reductase cDNA Gene: Analysis of Signals Utilized for Efficient Expression”, Mol. Cell. Biol., 2, pp. 1304-19 (1982)) or glutamine synthetase (“GS”) amplification (see, e.g., U.S. Pat. No. 5,122,464 and European published application 338,841).

[0376] In some embodiments, the human IL-2 muteins of the present disclosure will be expressed from vectors, preferably expression vectors. The vectors are useful for autonomous replication in a host cell or may be integrated into the genome of a host cell upon introduction into the host cell, and thereby are replicated along with the host genome (e.g., nonepisomal mammalian vectors). Expression vectors are capable of directing the expression of coding sequences to which they are operably linked. In general, expression vectors of utility in recombinant DNA techniques are often in the form of plasmids (vectors). However, other forms of expression vectors, such as viral vectors (e.g., replication defective retroviruses, adenoviruses, and adeno-associated viruses) are included also.

[0377] Exemplary recombinant expression vectors can include one or more regulatory sequences, selected on the basis of the host cells to be used for expression, operably linked to the nucleic acid sequence to be expressed.

[0378] The expression constructs or vectors can be designed for expression of an IL-2 mutein or variant thereof in prokaryotic or eukaryotic host cells.

[0379] Vector DNA can be introduced into prokaryotic or eukaryotic cells via conventional transformation or transfection techniques. Suitable methods for transforming or transfecting host cells can be found in Sambrook et al. (1989) Molecular Cloning: A Laboratory Manual (2d ed., Cold Spring Harbor Laboratory Press, Plainview, N.Y.) and other standard molecular biology laboratory manuals.

[0380] Expression of proteins in prokaryotes is most often carried out in Escherichia coli with vectors containing constitutive or inducible promoters. Strategies to maximize recombinant protein expression in E. coli can be found, for example, in Gottesman (1990) in Gene Expression Technology: Methods in Enzymology 185 (Academic Press, San Diego, Calif), pp. 119-128 and Wada et al. (1992) Nucleic Acids Res. 20:2111-2118. Processes for growing, harvesting, disrupting, or extracting the IL-2 mutein or variant thereof from cells are substantially described in, for example, U.S. Pat. Nos. 4,604,377; 4,738,927; 4,656,132; 4,569,790; 4,748,234; 4,530,787; 4,572,798; 4,748,234; and 4,931,543, herein incorporated by reference in their entireties.

[0381] In some embodiments the recombinant IL-2 muteins or biologically active variants thereof can also be made in eukaryotes, such as yeast or human cells. Suitable eukaryotic host cells include insect cells (examples of Baculovirus vectors available for expression of proteins in cultured insect cells (e.g., Sf9 cells) include the pAc series (Smith et al. (1983) Mol. Cell Biol. 3:2156-2165) and the pVL series (Lucklow and Summers (1989) Virology 170:31-39)); yeast cells (examples of vectors for expression in yeast S. cerenvisiae include pYepSecl (Baldari et al. (1987) EMBO J. 6:229-234), pMFa (Kurjan and Herskowitz (1982) Cell 30:933-943), pJRY88 (Schultz et al. (1987) Gene 54:113-123), pYES2 (Invitrogen Corporation, San Diego, Calif), and pPicZ (Invitrogen Corporation, San Diego, Calif.)); or mammalian cells (mammalian expression vectors include pCDM8 (Seed (1987) Nature 329:840) and pMT2PC (Kaufman et al. (1987) EMBO J. 6:187:195)). Suitable mammalian cells include Chinese hamster ovary cells (CHO) or COS cells. In mammalian cells, the expression vector's control functions are often provided by viral regulatory elements. For example, commonly used promoters are derived from polyoma, Adenovirus 2, cytomegalovirus, and Simian Virus 40. For other suitable expression systems for both prokaryotic and eukaryotic cells, see Chapters 16 and 17 of Sambrook et al. (1989) Molecular Cloning: A Laboratory Manual (2^{nd} ed., Cold Spring Harbor Laboratory Press, Plainview, N.Y.). See, Goeddel (1990) in Gene Expression Technology: Methods in Enzymology 185 (Academic Press, San Diego, Calif).

[0382] The sequences encoding the human IL-2 muteins of the present disclosure can be optimized for expression in the host cell of interest. The G-C content of the sequence can be adjusted to levels average for a given cellular host, as calculated by reference to known genes expressed in the host cell. Methods for codon optimization are well known in the art. Codons within the IL-2 mutein coding sequence can be optimized to enhance expression in the host cell, such that about 1%, about 5%, about 10%, about 25%, about 50%, about 75%, or up to 100% of the codons within the coding sequence have been optimized for expression in a particular host cell.

[0383] Vectors suitable for use include T7-based vectors for use in bacteria (see, for example, Rosenberg et al., Gene 56:125, 1987), the pMSXND expression vector for use in mammalian cells (Lee and Nathans, J. Biol. Chem. 263:3521, 1988), and baculovirus-derived vectors (for example, the expression vector pBacPAK9 from Clontech, Palo Alto, Calif) for use in insect cells.

[0384] In some embodiments nucleic acid inserts, which encode the subject IL-2 muteins in such vectors, can be operably linked to a promoter, which is selected based on, for example, the cell type in which expression is sought.

[0385] In selecting an expression control sequence, a variety of factors should also be considered. These include, for example, the relative strength of the sequence, its controllability, and its compatibility with the actual DNA sequence encoding the subject IL-2 mutein, particularly as regards potential secondary structures. Hosts should be selected by consideration of their compatibility with the chosen vector, the toxicity of the product coded for by the DNA sequences of this invention, their secretion characteristics, their ability to fold the polypeptides correctly, their fermentation or culture requirements, and the ease of purification of the products coded for by the DNA sequences.

[0386] Within these parameters one of skill in the art may select various vector/expression control sequence/host combinations that will express the desired DNA sequences on fermentation or in large scale animal culture, for example, using CHO cells or COS 7 cells.

[0387] The choice of expression control sequence and expression vector, in some embodiments, will depend upon the choice of host. A wide variety of expression host/vector combinations can be employed. Useful expression vectors for eukaryotic hosts, include, for example, vectors with expression control sequences from SV40, bovine papilloma virus, adenovirus and cytomegalovirus. Useful expression vectors for bacterial hosts include known bacterial plasmids, such as plasmids from E. coli, including col E1, pCRI, pER32z, pMB9 and their derivatives, wider host range plasmids, such as RP4, phage DNAs, e.g., the numerous derivatives of phage lambda, e.g., NM989, and other DNA phages, such as M13 and filamentous single stranded DNA phages. Useful expression vectors for yeast cells include the 2μ plasmid and derivatives thereof. Useful vectors for insect cells include pVL 941 and pFastBac™ 1 (GibcoBRL, Gaithersburg, Md.). Cate et al., “Isolation Of The Bovine And Human Genes For Mullerian Inhibiting Substance And Expression Of The Human Gene In Animal Cells”, Cell, 45, pp. 685-98 (1986).

[0388] In addition, any of a wide variety of expression control sequences can be used in these vectors. Such useful expression control sequences include the expression control sequences associated with structural genes of the foregoing expression vectors. Examples of useful expression control sequences include, for example, the early and late promoters of SV40 or adenovirus, the lac system, the trp system, the TAC or TRC system, the major operator and promoter regions of phage lambda, for example PL, the control regions of fd coat protein, the promoter for 3-phosphoglycerate kinase or other glycolytic enzymes, the promoters of acid phosphatase, e.g., PhoA, the promoters of the yeast a-mating system, the polyhedron promoter of Baculovirus, and other sequences known to control the expression of genes of prokaryotic or eukaryotic cells or their viruses, and various combinations thereof.

[0389] A T7 promoter can be used in bacteria, a polyhedrin promoter can be used in insect cells, and a cytomegalovirus or metallothionein promoter can be used in mammalian cells. Also, in the case of higher eukaryotes, tissue-specific and cell type-specific promoters are widely available. These promoters are so named for their ability to direct expression of a nucleic acid molecule in a given tissue or cell type within the body. Skilled artisans are well aware of numerous promoters and other regulatory elements which can be used to direct expression of nucleic acids.

[0390] In addition to sequences that facilitate transcription of the inserted nucleic acid molecule, vectors can contain origins of replication, and other genes that encode a selectable marker. For example, the neomycin-resistance (neor) gene imparts G418 resistance to cells in which it is expressed, and thus permits phenotypic selection of the transfected cells. Those of skill in the art can readily determine whether a given regulatory element or selectable marker is suitable for use in a particular experimental context.

[0391] Viral vectors that can be used in the invention include, for example, retroviral, adenoviral, and adeno-associated vectors, herpes virus, simian virus 40 (SV40), and bovine papilloma virus vectors (see, for example, Gluzman (Ed.), Eukaryotic Viral Vectors, CSH Laboratory Press, Cold Spring Harbor, N.Y.).

[0392] Prokaryotic or eukaryotic cells that contain and express a nucleic acid molecule that encodes a subject IL-2 mutein disclosed herein are also features of the invention. A cell of the invention is a transfected cell, i.e., a cell into which a nucleic acid molecule, for example a nucleic acid molecule encoding a mutant IL-2 polypeptide, has been introduced by means of recombinant DNA techniques. The progeny of such a cell are also considered within the scope of the invention.

[0393] The precise components of the expression system are not critical. For example, an IL-2 mutein can be produced in a prokaryotic host, such as the bacterium E. coli, or in a eukaryotic host, such as an insect cell (e.g., an Sf21 cell), or mammalian cells (e.g., CHO, HEK293, COS cells, NIH 3T3 cells, or HeLa cells). These cells are available from many sources, including the American Type Culture Collection (Manassas, Va.). In selecting an expression system, it matters only that the components are compatible with one another. Artisans or ordinary skill are able to make such a determination. Furthermore, if guidance is required in selecting an expression system, skilled artisans may consult Ausubel et al. (Current Protocols in Molecular Biology, John Wiley and Sons, New York, N.Y., 1993) and Pouwels et al. (Cloning Vectors: A Laboratory Manual, 1985 Suppl. 1987).

[0394] The expressed polypeptides can be purified from the expression system using routine biochemical procedures, and can be used, e.g., as therapeutic agents, as described herein.

[0395] In some embodiments, IL-2 muteins obtained will be glycosylated or unglycosylated depending on the host organism used to produce the mutein. If bacteria are chosen as the host then the IL-2 mutein produced will be unglycosylated. Eukaryotic cells, on the other hand, will glycosylate the IL-2 muteins, although perhaps not in the same way as native-IL-2 is glycosylated. The IL-2 mutein produced by the transformed host can be purified according to any suitable method. Various methods are known for purifying IL-2. See, e.g. Current Protocols in Protein Science, Vol 2. Eds: John E. Coligan, Ben M. Dunn, Hidde L. Ploehg, David W. Speicher, Paul T. Wingfield, Unit 6.5 (Copyright 1997, John Wiley and Sons, Inc. IL-2 muteins can be isolated from inclusion bodies generated in E. coli, or from conditioned medium from either mammalian or yeast cultures producing a given mutein using cation exchange, gel filtration, and/or reverse phase liquid chromatography.

[0396] Another exemplary method of constructing a DNA sequence encoding the IL-2 muteins is by chemical synthesis. This includes direct synthesis of a peptide by chemical means of the protein sequence encoding for an IL-2 mutein exhibiting the properties described. This method can incorporate both natural and unnatural amino acids at positions that affect the interactions of IL-2 with the IL-2Rα, the IL-2Rβ and/or the IL-2Rγ. Alternatively a gene which encodes the desired IL-2 mutein can be synthesized by chemical means using an oligonucleotide synthesizer. Such oligonucleotides are designed based on the amino acid sequence of the desired IL-2 mutein, and preferably selecting those codons that are favored in the host cell in which the recombinant mutein will be produced. In this regard, it is well recognized that the genetic code is degenerate—that an amino acid may be coded for by more than one codon. For example, Phe (F) is coded for by two codons, TIC or TTT, Tyr (Y) is coded for by TAC or TAT and his (H) is coded for by CAC or CAT. Trp (W) is coded for by a single codon, TGG. Accordingly, it will be appreciated that for a given DNA sequence encoding a particular IL-2 mutein, there will be many DNA degenerate sequences that will code for that IL-2 mutein. For example, it will be appreciated that in addition to the preferred DNA sequence for mutein H9, there will be many degenerate DNA sequences that code for the IL-2 mutein shown. These degenerate DNA sequences are considered within the scope of this disclosure. Therefore, “degenerate variants thereof” in the context of this invention means all DNA sequences that code for and thereby enable expression of a particular mutein.

[0397] The biological activity of the IL-2 muteins can be assayed by any suitable method known in the art. Such assays include PHA-blast proliferation and NK cell proliferation.

[0398] I. Anti-Pd-1 Antibodies and Combinations

[0399] Anti-PD-1 antibodies for use according to the invention and methods described herein include but are not limited to nivolumab, BMS-936558, MDX-1106, ONO-4538, AMP224, CT-011, and MK-3475 (pembrolizumab), cemiplimab (REGN2810), SHR-1210 (CTR20160175 and CTR20170090), SHR-1210 (CTR20170299 and CTR20170322), JS-001 (CTR20160274), IBI308 (CTR20160735), BGB-A317 (CTR20160872) and/or a PD-1 antibody as recited in U.S. Patent Publication No. 2017/0081409 (see, e.g., Table 38). There are two approved anti-PD-1 antibodies, pembrolizumab (Keytruda®; MK-3475-033) and nivolumab (Opdivo®; CheckMate078) and many more in development which can be used in combination described herein. Exemplary anti-PD-1 antibody sequences are shown in FIG. 10 and any of these can be used with the combination methods with the IL-2 muteins as described herein.

TABLE 38
PD-1 antibody sequences from U.S. Patent Publication No. 2017/0081409

| SEQ ID | | |
|---|---|---|
| NO: | | Sequence |
| 286 | >US20170081409A1_ | SYGMH |
| | 1 | |
| 287 | >US20170081409A1_ | VIWYDGSNKYYADSVKG |
| | 2 | |
| 288 | >US20170081409A1_ | NVDY |
| | 3 | |
| 289 | >US20170081409A1_ | RASQSVSSNLA |
| | 4 | |
| 290 | >US20170081409A1_ | GASTRAT |
| | 5 | |
| 291 | >US20170081409A1_ | QQYNNWPRT |
| | 6 | |
| 292 | >US20170081409A1_ | NGDH |
| | 7 | |
| 293 | >US20170081409A1_ | GFTFSSYG |
| | 8 | |
| 294 | >US20170081409A1_ | IWYDGSNK |
| | 9 | |
| 295 | >US20170081409A1_ | ASNVDY |
| | 10 | |
| 296 | >US20170081409A1_ | QSVSSN |
| | 11 | |
| 297 | >US20170081409A1_ | GAS |
| | 12 | |
| 298 | >US20170081409A1_ | QQYNNWPRT |
| | 13 | |
| 299 | >US20170081409A1_ | ASNGDH |
| | 14 | |
| 300 | >US20170081409A1_ | QVQLVESGGGVVQPGRSLRLSCAASGFTFSSYGMHWVRQAPGKGLEW |
| | 15 | VAVIWYDGSNKYYADSVKGRFTISRDNSKNTLYLQMNSLRAEDTAVYYC |
| | | ASNVDYWGQGTLVTVSS |
| 301 | >US20170081409A1_ | EIVMTQSPATLSVSPGERATLSCRASQSVSSNLAWYQQKPGQAPRLLIYG |
| | 16 | ASTRATGIPARFSGSGSGTEFTLTISSLQSEDFAVYYCQQYNNWPRTFGQ |
| | | GTKVEIK |
| 302 | >US20170081409A1_ | QVQLVESGGGVVQPGRSLRLSCAASGFTFSSYGMHWVRQAPGKGLEW |
| | 17 | VAVIWYDGSNKYYADSVKGRFTISRDNSKNTLYLQMNSLRAEDTAVYYC |
| | | ASNGDHWGQGTLVTVSS |
| 303 | >US20170081409A1_ | QVQLVESGGGVVQPGRSLRLSCAASGFTFSSYGMHWVRQAPGKGLEW |
| | 18 | VAVIWYDGSNKYYADSVKGRFTISRDNSKNTLYLQMNSLRAEDTAVYYC |
| | | ASNVDYWGQGTLVTVSSASTKGPSVFPLAPCSRSTSESTAALGCLVKDYF |
| | | PEPVTVSWNSGALTSGVHTFPAVLQSSGLYSLSSVVTVPSSSLGTKTYTCN |
| | | VDHKPSNTKVDKRVESKYGPPCPPCPAPEFLGGPSVFLFPPKPKDTLMISR |
| | | TPEVTCVVVDVSQEDPEVQFNWYVDGVEVHNAKTKPREEQFNSTYRVV |
| | | SVLTVLHQDWLNGKEYKCKVSNKGLPSSIEKTISKAKGQPREPQVYTLPPS |
| | | QEEMTKNQVSLTCLVKGFYPSDIAVEWESNGQPENNYKTTPPVLDSDGS |
| | | FFLYSRLTVDKSRWQEGNVFSCSVMHEALHNHYTQKSLSLSLGK |
| 304 | >US20170081409A1_ | EIVMTQSPATLSVSPGERATLSCRASQSVSSNLAWYQQKPGQAPRLLIYG |
| | 19 | ASTRATGIPARFSGSGSGTEFTLTISSLQSEDFAVYYCQQYNNWPRTFGQ |
| | | GTKVEIKRTVAAPSVFIFPPSDEQLKSGTASVVCLLNNFYPREAKVQWKV |
| | | DNALQSGNSQESVTEQDSKDSTYSLSSTLTLSKADYEKHKVYACEVTHQG |
| | | LSSPVTKSFNRGEC |
| 305 | >US20170081409A1_ | QVQLVESGGGVVQPGRSLRLSCAASGFTFSSYGMHWVRQAPGKGLEW |
| | 20 | VAVIWYDGSNKYYADSVKGRFTISRDNSKNTLYLQMNSLRAEDTAVYYC |
| | | ASNGDHWGQGTLVTVSSASTKGPSVFPLAPCSRSTSESTAALGCLVKDYF |
| | | PEPVTVSWNSGALTSGVHTFPAVLQSSGLYSLSSVVTVPSSSLGTKTYTCN |
| | | VDHKPSNTKVDKRVESKYGPPCPPCPAPEFLGGPSVFLFPPKPKDTLMISR |
| | | TPEVTCVVVDVSQEDPEVQFNWYVDGVEVHNAKTKPREEQFNSTYRVV |
| | | SVLTVLHQDWLNGKEYKCKVSNKGLPSSIEKTISKAKGQPREPQVYTLPPS |
| | | QEEMTKNQVSLTCLVKGFYPSDIAVEWESNGQPENNYKTTPPVLDSDGS |
| | | FFLYSRLTVDKSRWQEGNVFSCSVMHEALHNHYTQKSLSLSLGK |
| 306 | >US20170081409A1_ | QVQLVESGGGVVQPGRSLRLSCAASGFTFSSYGMHWVRQAPGKGLEW |
| | 21 | VAVIWYDGSNKYYADSVKGRFTISRDNSKNTLYLQMNSLRAEDTAVYYC |
| | | ASNVDYWGQGTLVTVSSASTKGPSVFPLAPSSKSTSGGTAALGCLVKDYF |
| | | PEPVTVSWNSGALTSGVHTFPAVLQSSGLYSLSSVVTVPSSSLGTQTYICN |
| | | VNHKPSNTKVDKRVEPKSCDKTHTCPPCPAPELLGGPSVFLFPPKPKDTL |
| | | MISRTPEVTCVVVDVSHEDPEVKFNWYVDGVEVHNAKTKPREEQYNST |
| | | YRVVSVLTVLHQDWLNGKEYKCKVSNKALPAPIEKTISKAKGQPREPQVY |
| | | TLPPSREEMTKNQVSLTCLVKGFYPSDIAVEWESNGQPENNYKTTPPVLD |
| | | SDGSFFLYSKLTVDKSRWQQGNVFSCSVMHEALHNHYTQKSLSLSPGK |
| 307 | >US20170081409A1_ | QVQLVESGGGVVQPGRSLRLSCAASGFTFSSYGMHWVRQAPGKGLEW |
| | 22 | VAVIWYDGSNKYYADSVKGRFTISRDNSKNTLYLQMNSLRAEDTAVYYC |
| | | ASNGDHWGQGTLVTVSSASTKGPSVFPLAPSSKSTSGGTAALGCLVKDY |
| | | FPEPVTVSWNSGALTSGVHTFPAVLQSSGLYSLSSVVTVPSSSLGTQTYIC |
| | | NVNHKPSNTKVDKRVEPKSCDKTHTCPPCPAPELLGGPSVFLFPPKPKDT |
| | | LMISRTPEVTCVVVDVSHEDPEVKFNWYVDGVEVHNAKTKPREEQYNST |
| | | YRVVSVLTVLHQDWLNGKEYKCKVSNKALPAPIEKTISKAKGQPREPQVY |
| | | TLPPSREEMTKNQVSLTCLVKGFYPSDIAVEWESNGQPENNYKTTPPVLD |
| | | SDGSFFLYSKLTVDKSRWQQGNVFSCSVMHEALHNHYTQKSLSLSPGK |
| 308 | >US20170081409A1_ | QVQLVESGGGVVQPGRSLRLSCAASGFTFSSYGMHWVRQAPGKGLEW |
| | 23 | VAVIWYDGSNKYYADSVKGRFTISRDNSKNTLYLQMNSLRAEDTAVYYC |
| | | ASNGDHWGQGTLVTVSSASTKGPSVFPLAPSSKSTSGGTAALGCLVKDY |
| | | FPEPVTVSWNSGALTSGVHTFPAVLQSSGLYSLSSVVTVPSSSLGTQTYIC |
| | | NVNHKPSNTKVDKRVEPKSCDKTHTCPPCPAPELLGGPSVFLFPPKPKDT |
| | | LMISRTPEVTCVVVDVSHEDPEVKFNWYVDGVEVHNAKTKPREEQYAST |
| | | YRVVSVLTVLHQDWLNGKEYKCKVSNKALPAPIEKTISKAKGQPREPQVY |
| | | TLPPSREEMTKNQVSLTCLVKGFYPSDIAVEWESNGQPENNYKTTPPVLD |
| | | SDGSFFLYSKLTVDKSRWQQGNVFSCSVMHEALHNHYTQKSLSLSPGK |
| 309 | >US20170081409A1_ | QVQLVESGGGVVQPGRSLRLSCAASGFTFSSYGMHWVRQAPGKGLEW |
| | 24 | VAVIWYDGSNKYYADSVKGRFTISRDNSKNTLYLQMNSLRAEDTAVYYC |
| | | ASNGDHWGQGTLVTVSSASTKGPSVFPLAPSSKSTSGGTAALGCLVKDY |
| | | FPEPVTVSWNSGALTSGVHTFPAVLQSSGLYSLSSVVTVPSSSLGTQTYIC |
| | | NVNHKPSNTKVDKRVEPKSCDKTHTCPPCPAPELLGGPSVFLFPPKPKDT |
| | | LMISRTPEVTCVVVDVEHEDPEVKFNWYVDGVEVHNAKTKPREEQYNS |
| | | TYRVVSVLTVLHQDWLNGKEYKCKVSNKAFPAPIEKTISKAKGQPREPQV |
| | | YTLPPSREEMTKNQVSLTCLVKGFYPSDIAVEWESNGQPENNYKTTPPVL |
| | | DSDGSFFLYSKLTVDKSRWQQGNVFSCSVMHEALHNHYTQKSLSLSPGK |
| 310 | >US20170081409A1_ | QVQLVESGGGVVQPGRSLRLSCAASGFTFSSYGMHWVRQAPGKGLEW |
| | 25 | VAVIWYDGSNKYYADSVKGRFTISRDNSKNTLYLQMNSLRAEDTAVYYC |
| | | ASNGDHWGQGTLVTVSSASTKGPSVFPLAPSSKSTSGGTAALGCLVKDY |
| | | FPEPVTVSWNSGALTSGVHTFPAVLQSSGLYSLSSVVTVPSSSLGTQTYIC |
| | | NVNHKPSNTKVDKRVEPKSCDKTHTCPPCPAPELLGGPDVFLFPPKPKDT |
| | | LMISRTPEVTCVVVDVSHEDPEVKFNWYVDGVEVHNAKTKPREEQYNST |
| | | YRVVSVLTVLHQDWLNGKEYKCKVSNKALPLPEEKTISKAKGQPREPQVY |
| | | TLPPSREEMTKNQVSLTCLVKGFYPSDIAVEWESNGQPENNYKTTPPVLD |
| | | SDGSFFLYSKLTVDKSRWQQGNVFSCSVMHEALHNHYTQKSLSLSPGK |
| 311 | >US20170081409A1_ | QVQLVESGGGVVQPGRSLRLSCAASGFTFSSYGMHWVRQAPGKGLEW |
| | 26 | VAVIWYDGSNKYYADSVKGRFTISRDNSKNTLYLQMNSLRAEDTAVYYC |
| | | ATNGDYWGQGTLVTVSS |
| 312 | >US20170081409A1_ | QVQLVESGGGVVQPGRSLRLSCAASGFTFSSYGMHWVRQAPGKGLEW |
| | 27 | VAVIWYDGSNKYYADSVKGRFTISRDNSKNTLYLQMNSLRAEDTAVYYC |
| | | ASNGDYWGQGTLVTVSS |
| 313 | >US20170081409A1_ | QVQLVESGGGVVQPGRSLRLSCAASGFTFSSYGMHWVRQAPGKGLEW |
| | 28 | VAVIWYDGSNEYYADSVKGRFTISRDNSKNTLYLQMNSLRAEDTAVYYC |
| | | ASNGDHWGQGTLVTVSS |
| 314 | >US20170081409A1_ | QVQLVESGGGMVQPGRSLRLSCAASGFTFSSYGMHWVRQAPGKGLE |
| | 29 | WVAVIWFDGSNKYYADSVKGRFTISRDNSKNTLYLQMNSLRAEDTAVYY |
| | | CASNGDHWGQGTLVTVSS |
| 315 | >US20170081409A1_ | QVQLVESGGGVVQPGRSLRLSCAASGFTFSSYGMHWVRQAPGKGLEW |
| | 30 | VAVIWYDGSNKYYADSVKGRFTISRDNSKNTLYLQMNSLRAEDTAVYYC |
| | | ASNGDHWGHGTLVTVSS |
| 316 | >US20170081409A1_ | QVQLVESGGGVVQPGRSLRLSCAASGFTFSSYGMHWVRQAPGKGLEW |
| | 31 | VAVIWYDGSNKYYADSVMGRFTISRDNSKNTLYLQMNSLRAEDTAVYYC |
| | | ASNGDHWGQGTLVTVSS |
| 317 | >US20170081409A1_ | VIWXDGSNXYYADSVXG |
| | 32 | |
| 318 | >US20170081409A1_ | NXDX |
| | 33 | |
| 319 | >US20170081409A1_ | VIWYDGSNEYYADSVKG |
| | 34 | |
| 320 | >US20170081409A1_ | VIWFDGSNKYYADSVKG |
| | 35 | |
| 321 | >US20170081409A1_ | VIWYDGSNKYYADSVMG |
| | 36 | |
| 322 | >US20170081409A1_ | NGDY |
| | 37 | |
| 323 | >US20170081409A1_ | QVQLVESGGGVVQPGRSLRLSCAASGFTFS |
| | 38 | |
| 324 | >US20170081409A1_ | QVQLVESGGGMVQPGRSLRLSCAASGFTFS |
| | 39 | |
| 325 | >US20170081409A1_ | WVRQAPGKGLEWVA |
| | 40 | |
| 326 | >US20170081409A1_ | RFTISRDNSKNTLYLQMNSLRAEDTAVYYCAS |
| | 41 | |
| 327 | >US20170081409A1_ | RFTISRDNSKNTLYLQMNSLRAEDTAVYYCAT |
| | 42 | |
| 328 | >US20170081409A1_ | WGQGTLVTVSS |
| | 43 | |
| 329 | >US20170081409A1_ | WGHGTLVTVSS |
| | 44 | |
| 330 | >US20170081409A1_ | EIVMTQSPATLSVSPGERATLSC |
| | 45 | |
| 331 | >US20170081409A1_ | WYQQKPGQAPRLLIY |
| T | 46 | |
| 332 | >US20170081409A1_ | GIPARFSGSGSGTEFTLTISSLQSEDFAVYYC |
| | 47 | |
| 333 | >US20170081409A1_ | FGQGTKVEIK |
| | 48 | |
| 334 | >US20170081409A1_ | QVQLVESGGGXVQPGRSLRLSCAASGFTFSSYGMHWVRQAPGKGLEW |
| | 49 | VAVIWXDGSNXYYADSVXGRFTISRDNSKNTLYLQMNSLRAEDTAVYYC |
| | | AXNXDXWGXGTLVTVSS |
| 335 | >US20170081409A1_ | QVQLVESGGGVVQPGRSLRLSCAASGFTFSSYGMHWVRQAPGKGLEW |
| | 50 | VAVIWYDGSNKYYADSVKGRFTISRDNSKNTLYLQMNSLRAEDTAVYYC |
| | | AR |
| 336 | >US20170081409A1_ | EIVMTQSPATLSVSPGERATLSCRASQSVSSNLAWYQQKPGQAPRLLIYG |
| | 51 | ASTRATGIPARFSGSGSGTEFTLTISSLQSEDFAVYYCQQYNNWP |
| 337 | >US20170081409A1_ | QVQLVESGGGVVQPGRSLRLSCAASGFTFSSYGMHWVRQAPGKGLEW |
| | 52 | VAVIWYDGSNKYYADSVKGRFTISRDNSKNTLYLQMNSLRAEDTAVYYC |
| | | ASNVDYWGQGTLVTVSSASTKGPSVFPLAPCSRSTSESTAALGCLVKDYF |
| | | PEPVTVSWNSGALTSGVHTFPAVLQSSGLYSLSSVVTVPSSSLGTKTYTCN |
| | | VDHKPSNTKVDKRVESKYGPPCPPCPAPEFLGGPSVFLFPPKPKDTLMISR |
| | | TPEVTCVVVDVSQEDPEVQFNWYVDGVEVHNAKTKPREEQFNSTYRVV |
| | | SVLTVLHQDWLNGKEYKCKVSNKGLPSSIEKTISKAKGQPREPQVYTLPPS |
| | | QEEMTKNQVSLTCLVKGFYPSDIAVEWESNGQPENNYKTTPPVLDSDGS |
| | | FFLYSRLTVDKSRWQEGNVFSCSVMHEALHNHYTQKSLSLSLG |
| 338 | >US20170081409A1_ | QVQLVESGGGVVQPGRSLRLSCAASGFTFSSYGMHWVRQAPGKGLEW |
| | 53 | VAVIWYDGSNKYYADSVKGRFTISRDNSKNTLYLQMNSLRAEDTAVYYC |
| | | ASNGDHWGQGTLVTVSSASTKGPSVFPLAPCSRSTSESTAALGCLVKDYF |
| | | PEPVTVSWNSGALTSGVHTFPAVLQSSGLYSLSSVVTVPSSSLGTKTYTCN |
| | | VDHKPSNTKVDKRVESKYGPPCPPCPAPEFLGGPSVFLFPPKPKDTLMISR |
| | | TPEVTCVVVDVSQEDPEVQFNWYVDGVEVHNAKTKPREEQFNSTYRVV |
| | | SVLTVLHQDWLNGKEYKCKVSNKGLPSSIEKTISKAKGQPREPQVYTLPPS |
| | | QEEMTKNQVSLTCLVKGFYPSDIAVEWESNGQPENNYKTTPPVLDSDGS |
| | | FFLYSRLTVDKSRWQEGNVFSCSVMHEALHNHYTQKSLSLSLG |
| 339 | >US20170081409A1_ | QVQLVESGGGVVQPGRSLRLSCAASGFTFSSYGMHWVRQAPGKGLEW |
| | 54 | VAVIWYDGSNKYYADSVKGRFTISRDNSKNTLYLQMNSLRAEDTAVYYC |
| | | ASNVDYWGQGTLVTVSSASTKGPSVFPLAPSSKSTSGGTAALGCLVKDYF |
| | | PEPVTVSWNSGALTSGVHTFPAVLQSSGLYSLSSVVTVPSSSLGTQTYICN |
| | | VNHKPSNTKVDKRVEPKSCDKTHTCPPCPAPELLGGPSVFLFPPKPKDTL |
| | | MISRTPEVTCVVVDVSHEDPEVKFNWYVDGVEVHNAKTKPREEQYNST |
| | | YRVVSVLTVLHQDWLNGKEYKCKVSNKALPAPIEKTISKAKGQPREPQVY |
| | | TLPPSREEMTKNQVSLTCLVKGFYPSDIAVEWESNGQPENNYKTTPPVLD |
| | | SDGSFFLYSKLTVDKSRWQQGNVFSCSVMHEALHNHYTQKSLSLSPG |
| 340 | >US20170081409A1_ | QVQLVESGGGVVQPGRSLRLSCAASGFTFSSYGMHWVRQAPGKGLEW |
| | 55 | VAVIWYDGSNKYYADSVKGRFTISRDNSKNTLYLQMNSLRAEDTAVYYC |
| | | ASNGDHWGQGTLVTVSSASTKGPSVFPLAPSSKSTSGGTAALGCLVKDY |
| | | FPEPVTVSWNSGALTSGVHTFPAVLQSSGLYSLSSVVTVPSSSLGTQTYIC |
| | | NVNHKPSNTKVDKRVEPKSCDKTHTCPPCPAPELLGGPSVFLFPPKPKDT |
| | | LMISRTPEVTCVVVDVSHEDPEVKFNWYVDGVEVHNAKTKPREEQYNST |
| | | YRVVSVLTVLHQDWLNGKEYKCKVSNKALPAPIEKTISKAKGQPREPQVY |
| | | TLPPSREEMTKNQVSLTCLVKGFYPSDIAVEWESNGQPENNYKTTPPVLD |
| | | SDGSFFLYSKLTVDKSRWQQGNVFSCSVMHEALHNHYTQKSLSLSPG |
| 341 | >US20170081409A1_ | QVQLVESGGGVVQPGRSLRLSCAASGFTFSSYGMHWVRQAPGKGLEW |
| | 56 | VAVIWYDGSNKYYADSVKGRFTISRDNSKNTLYLQMNSLRAEDTAVYYC |
| | | ASNGDHWGQGTLVTVSSASTKGPSVFPLAPSSKSTSGGTAALGCLVKDY |
| | | FPEPVTVSWNSGALTSGVHTFPAVLQSSGLYSLSSVVTVPSSSLGTQTYIC |
| | | NVNHKPSNTKVDKRVEPKSCDKTHTCPPCPAPELLGGPSVFLFPPKPKDT |
| | | LMISRTPEVTCVVVDVSHEDPEVKFNWYVDGVEVHNAKTKPREEQYAST |
| | | YRVVSVLTVLHQDWLNGKEYKCKVSNKALPAPIEKTISKAKGQPREPQVY |
| | | TLPPSREEMTKNQVSLTCLVKGFYPSDIAVEWESNGQPENNYKTTPPVLD |
| | | SDGSFFLYSKLTVDKSRWQQGNVFSCSVMHEALHNHYTQKSLSLSPG |
| 342 | >US20170081409A1_ | QVQLVESGGGVVQPGRSLRLSCAASGFTFSSYGMHWVRQAPGKGLEW |
| | 57 | VAVIWYDGSNKYYADSVKGRFTISRDNSKNTLYLQMNSLRAEDTAVYYC |
| | | ASNGDHWGQGTLVTVSSASTKGPSVFPLAPSSKSTSGGTAALGCLVKDY |
| | | FPEPVTVSWNSGALTSGVHTFPAVLQSSGLYSLSSVVTVPSSSLGTQTYIC |
| | | NVNHKPSNTKVDKRVEPKSCDKTHTCPPCPAPELLGGPSVFLFPPKPKDT |
| | | LMISRTPEVTCVVVDVEHEDPEVKFNWYVDGVEVHNAKTKPREEQYNS |
| | | TYRVVSVLTVLHQDWLNGKEYKCKVSNKAFPAPIEKTISKAKGQPREPQV |
| | | YTLPPSREEMTKNQVSLTCLVKGFYPSDIAVEWESNGQPENNYKTTPPVL |
| | | DSDGSFFLYSKLTVDKSRWQQGNVFSCSVMHEALHNHYTQKSLSLSPG |
| 343 | >US20170081409A1_ | QVQLVESGGGVVQPGRSLRLSCAASGFTFSSYGMHWVRQAPGKGLEW |
| | 58 | VAVIWYDGSNKYYADSVKGRFTISRDNSKNTLYLQMNSLRAEDTAVYYC |
| | | ASNGDHWGQGTLVTVSSASTKGPSVFPLAPSSKSTSGGTAALGCLVKDY |
| | | FPEPVTVSWNSGALTSGVHTFPAVLQSSGLYSLSSVVTVPSSSLGTQTYIC |
| | | NVNHKPSNTKVDKRVEPKSCDKTHTCPPCPAPELLGGPDVFLFPPKPKDT |
| | | LMISRTPEVTCVVVDVSHEDPEVKFNWYVDGVEVHNAKTKPREEQYNST |
| | | YRVVSVLTVLHQDWLNGKEYKCKVSNKALPLPEEKTISKAKGQPREPQVY |
| | | TLPPSREEMTKNQVSLTCLVKGFYPSDIAVEWESNGQPENNYKTTPPVLD |
| | | SDGSFFLYSKLTVDKSRWQQGNVFSCSVMHEALHNHYTQKSLSLSPG |
| 344 | >US20170081409A1_ | ASTKGPSVFPLAPSSKSTSGGTAALGCLVKDYFPEPVTVSWNSGALTSGV |
| | 59 | HTFPAVLQSSGLYSLSSVVTVPSSSLGTQTYICNVNHKPSNTKVDKRVEPK |
| | | SCDKTHTCPPCPAPELLGGPSVFLFPPKPKDTLMISRTPEVTCVVVDVSHE |
| | | DPEVKFNWYVDGVEVHNAKTKPREEQYNSTYRVVSVLTVLHQDWLNG |
| | | KEYKCKVSNKALPAPIEKTISKAKGQPREPQVYTLPPSREEMTKNQVSLTC |
| | | LVKGFYPSDIAVEWESNGQPENNYKTTPPVLDSDGSFFLYSKLTVDKSRW |
| | | QQGNVFSCSVMHEALHNHYTQKSLSLSPG |
| 345 | >US20170081409A1_ | ASTKGPSVFPLAPSSKSTSGGTAALGCLVKDYFPEPVTVSWNSGALTSGV |
| | 60 | HTFPAVLQSSGLYSLSSVVTVPSSSLGTQTYICNVNHKPSNTKVDKRVEPK |
| | | SCDKTHTCPPCPAPELLGGPSVFLFPPKPKDTLMISRTPEVTCVVVDVSHE |
| | | DPEVKFNWYVDGVEVHNAKTKPREEQYNSTYRVVSVLTVLHQDWLNG |
| | | KEYKCKVSNKALPAPIEKTISKAKGQPREPQVYTLPPSREEMTKNQVSLTC |
| | | LVKGFYPSDIAVEWESNGQPENNYKTTPPVLDSDGSFFLYSKLTVDKSRW |
| | | QQGNVFSCSVMHEALHNHYTQKSLSLSPGK |
| 346 | >US20170081409A1_ | ASTKGPSVFPLAPSSKSTSGGTAALGCLVKDYFPEPVTVSWNSGALTSGV |
| | 61 | HTFPAVLQSSGLYSLSSVVTVPSSSLGTQTYICNVNHKPSNTKVDKRVEPK |
| | | SCDKTHTCPPCPAPELLGGPSVFLFPPKPKDTLMISRTPEVTCVVVDVSHE |
| | | DPEVKFNWYVDGVEVHNAKTKPREEQYASTYRVVSVLTVLHQDWLNGK |
| | | EYKCKVSNKALPAPIEKTISKAKGQPREPQVYTLPPSREEMTKNQVSLTCL |
| | | VKGFYPSDIAVEWESNGQPENNYKTTPPVLDSDGSFFLYSKLTVDKSRW |
| | | QQGNVFSCSVMHEALHNHYTQKSLSLSPG |
| 347 | >US20170081409A1_ | ASTKGPSVFPLAPSSKSTSGGTAALGCLVKDYFPEPVTVSWNSGALTSGV |
| | 62 | HTFPAVLQSSGLYSLSSVVTVPSSSLGTQTYICNVNHKPSNTKVDKRVEPK |
| | | SCDKTHTCPPCPAPELLGGPSVFLFPPKPKDTLMISRTPEVTCVVVDVSHE |
| | | DPEVKFNWYVDGVEVHNAKTKPREEQYASTYRVVSVLTVLHQDWLNGK |
| | | EYKCKVSNKALPAPIEKTISKAKGQPREPQVYTLPPSREEMTKNQVSLTCL |
| | | VKGFYPSDIAVEWESNGQPENNYKTTPPVLDSDGSFFLYSKLTVDKSRW |
| | | QQGNVFSCSVMHEALHNHYTQKSLSLSPGK |
| 348 | >US20170081409A1_ | ASTKGPSVFPLAPCSRSTSESTAALGCLVKDYFPEPVTVSWNSGALTSGV |
| | 63 | HTFPAVLQSSGLYSLSSVVTVPSSSLGTKTYTCNVDHKPSNTKVDKRVESK |
| | | YGPPCPPCPAPEFLGGPSVFLFPPKPKDTLMISRTPEVTCVVVDVSQEDPE |
| | | VQFNWYVDGVEVHNAKTKPREEQFNSTYRVVSVLTVLHQDWLNGKEY |
| | | KCKVSNKGLPSSIEKTISKAKGQPREPQVYTLPPSQEEMTKNQVSLTCLVK |
| | | GFYPSDIAVEWESNGQPENNYKTTPPVLDSDGSFFLYSRLTVDKSRWQE |
| | | GNVFSCSVMHEALHNHYTQKSLSLSLG |
| 349 | >US20170081409A1_ | ASTKGPSVFPLAPCSRSTSESTAALGCLVKDYFPEPVTVSWNSGALTSGV |
| | 64 | HTFPAVLQSSGLYSLSSVVTVPSSSLGTKTYTCNVDHKPSNTKVDKRVESK |
| | | YGPPCPPCPAPEFLGGPSVFLFPPKPKDTLMISRTPEVTCVVVDVSQEDPE |
| | | VQFNWYVDGVEVHNAKTKPREEQFNSTYRVVSVLTVLHQDWLNGKEY |
| | | KCKVSNKGLPSSIEKTISKAKGQPREPQVYTLPPSQEEMTKNQVSLTCLVK |
| | | GFYPSDIAVEWESNGQPENNYKTTPPVLDSDGSFFLYSRLTVDKSRWQE |
| | | GNVFSCSVMHEALHNHYTQKSLSLSLGK |
| 350 | >US20170081409A1_ | RTVAAPSVFIFPPSDEQLKSGTASVVCLLNNFYPREAKVQWKVDNALQS |
| | 65 | GNSQESVTEQDSKDSTYSLSSTLTLSKADYEKHKVYACEVTHQGLSSPVTK |
| | | SFNRGEC |
| 351 | >US20170081409A1_ | EVQLVESGGGLTQPGKSLKLSCEASGFTFSSFTMHWVRQSPGKGLEWV |
| | 66 | AFIRSGSGIVFYADAVRGRFTISRDNAKNLLFLQMNDLKSEDTAMYYCAR |
| | | RPLGHNTFDSWGQGTLVTVSSASTKGPSVFPLAPSSKSTSGGTAALGCLV |
| | | KDYFPEPVTVSWNSGALTSGVHTFPAVLQSSGLYSLSSVVTVPSSSLGTQT |
| | | YICNVNHKPSNTKVDKRVEPKSCDKTHTCPPCPAPELLGGPSVFLFPPKPK |
| | | DTLMISRTPEVTCVVVDVSHEDPEVKFNWYVDGVEVHNAKTKPREEQY |
| | | NSTYRVVSVLTVLHQDWLNGKEYKCKVSNKALPAPIEKTISKAKGQPREP |
| | | QVYTLPPSREEMTKNQVSLTCLVKGFYPSDIAVEWESNGQPENNYKTTP |
| | | PVLDSDGSFFLYSKLTVDKSRWQQGNVFSCSVMHEALHNHYTQKSLSLS |
| | | PG |
| 352 | >US20170081409A1_ | DIVMTQSPSSLAVSPGEKVTMTCKSSQSLYYSGVKENLLAWYQQKPGQS |
| | 67 | PKLLIYYASIRFTGVPDRFTGSGSGTDYTLTITSVQAEDMGQYFCQQGINN |
| | | PLTFGDGTKLEIKRTVAAPSVFIFPPSDEQLKSGTASVVCLLNNFYPREAKV |
| | | QWKVDNALQSGNSQESVTEQDSKDSTYSLSSTLTLSKADYEKHKVYACE |
| | | VTHQGLSSPVTKSFNRGEC |
| 353 | >US20170081409A1_ | EVQLQQSGPELVKPGTSMKISCKASGYSFTGHLMNWVKQSHGKNLEWI |
| | 68 | GLIIPYNGGTSYNQKFKGKATLTVDKSSSTAYMELLSLTSDDSAVYFCSRGL |
| | | RGFYAMDYWGQGTSVTVSSASTKGPSVFPLAPSSKSTSGGTAALGCLVK |
| | | DYFPEPVTVSWNSGALTSGVHTFPAVLQSSGLYSLSSVVTVPSSSLGTQTY |
| | | ICNVNHKPSNTKVDKRVEPKSCDKTHTCPPCPAPELLGGPSVFLFPPKPK |
| | | DTLMISRTPEVTCVVVDVSHEDPEVKFNWYVDGVEVHNAKTKPREEQY |
| | | NSTYRVVSVLTVLHQDWLNGKEYKCKVSNKALPAPIEKTISKAKGQPREP |
| | | QVYTLPPSREEMTKNQVSLTCLVKGFYPSDIAVEWESNGQPENNYKTTP |
| | | PVLDSDGSFFLYSKLTVDKSRWQQGNVFSCSVMHEALHNHYTQKSLSLS |
| | | PG |
| 354 | >US20170081409A1_ | DVVLTQTPLSLSVSFGDQVSISCRSSQSLVNSYGNTFLSWYLHKPGQSPQ |
| | 69 | LLIFGISNRFSGVPDRFSGSGSGTDFTLKISTIKPEDLGMYYCLQGTHQPPT |
| | | FGPGTKLEVKRTVAAPSVFIFPPSDEQLKSGTASVVCLLNNFYPREAKVQ |
| | | WKVDNALQSGNSQESVTEQDSKDSTYSLSSTLTLSKADYEKHKVYACEVT |
| | | HQGLSSPVTKSFNRGEC |
| 355 | >US20170081409A1_ | QVQLQQWGAGLLKPSETLSLTCAVYGGSFSGYYWSWIRQSPEKGLEWI |
| | 70 | GEINHGGYVTYNPSLESRVTISVDTSKNQFSLKLSSVTAADTAVYYCARDY |
| | | GPGNYDWYFDLWGRGTLVTVSSASTKGPSVFPLAPSSKSTSGGTAALGC |
| | | LVKDYFPEPVTVSWNSGALTSGVHTFPAVLQSSGLYSLSSVVTVPSSSLGT |
| | | QTYICNVNHKPSNTKVDKRVEPKSCDKTHTCPPCPAPELLGGPSVFLFPPK |
| | | PKDTLMISRTPEVTCVVVDVSHEDPEVKFNWYVDGVEVHNAKTKPREE |
| | | QYNSTYRVVSVLTVLHQDWLNGKEYKCKVSNKALPAPIEKTISKAKGQPR |
| | | EPQVYTLPPSREEMTKNQVSLTCLVKGFYPSDIAVEWESNGQPENNYKT |
| | | TPPVLDSDGSFFLYSKLTVDKSRWQQGNVFSCSVMHEALHNHYTQKSLS |
| | | LSPG |
| 356 | >US20170081409A1_ | EIVLTQSPATLSLSPGERATLSCRASQSVSSYLAWYQQKPGQAPRLLIYDA |
| | 71 | SNRATGIPARFSGSGSGTDFTLTISSLEPEDFAVYYCQQRSNWPPALTFGG |
| | | GTKVEIKRTVAAPSVFIFPPSDEQLKSGTASVVCLLNNFYPREAKVQWKV |
| | | DNALQSGNSQESVTEQDSKDSTYSLSSTLTLSKADYEKHKVYACEVTHQG |
| | | LSSPVTKSFNRGEC |
| 357 | >US20170081409A1_ | QVQLVQSGSELKKPGASVKVSCKASGYTFTDYSMHWVRQAPGQGLKW |
| | 72 | MGWINTETGEPTYADDFKGRFVFSLDTSVSTAYLQISSLKAEDTAVYYCA |
| | | NPYYDYVSYYAMDYWGQGTTVTVSSASTKGPSVFPLAPSSKSTSGGTAA |
| | | LGCLVKDYFPEPVTVSWNSGALTSGVHTFPAVLQSSGLYSLSSVVTVPSSS |
| | | LGTQTYICNVNHKPSNTKVDKRVEPKSCDKTHTCPPCPAPELLGGPSVFLF |
| | | PPKPKDTLMISRTPEVTCVVVDVSHEDPEVKFNWYVDGVEVHNAKTKPR |
| | | EEQYNSTYRVVSVLTVLHQDWLNGKEYKCKVSNKALPAPIEKTISKAKGQ |
| | | PREPQVYTLPPSREEMTKNQVSLTCLVKGFYPSDIAVEWESNGQPENNY |
| | | KTTPPVLDSDGSFFLYSKLTVDKSRWQQGNVFSCSVMHEALHNHYTQKS |
| | | LSLSPG |
| 358 | >US20170081409A1_ | DIQMTQSPSSLSASVGDRVTITCKASQDVSTAVAWYQQKPGKAPKLLIYS |
| | 73 | ASYLYTGVPSRFSGSGSGTDFTFTISSLQPEDIATYYCQQHYSTPRTFGQG |
| | | TKLEIKRSVAAPSVFIFPPSDEQLKSGTASVVCLLNNFYPREAKVQWKVDN |
| | | ALQSGNSQESVTEQDSKDSTYSLSSTLTLSKADYEKHKVYACEVTHQGLSS |
| | | PVTKSFNRGEC |
| 359 | >US20170081409A1_ | PGWFLDSPDRPWNPPTFSPALLVVTEGDNATFTCSFSNTSESFVLNWYR |
| | 74 | MSPSNQTDKLAAFPEDRSQPGQDCRFRVTQLPNGRDFHMSVVRARRN |
| | | DSGTYLCGAISLAPKAQIKESLRAELRVTERRAEVPTAHPSPSPRPAGQFQ |
| | | TLVVGVVGGLLGSLVLLVWVLAVICSRAARGTIGARRTGQPLKEDPSAVP |
| | | VFSVDYGELDFQWREKTPEPPVPCVPEQTEYATIVFPSGMGTSSPARRGS |
| | | ADGPRSAQPLRPEDGHCSWPL |
| 360 | >US20170081409A1_ | SLAPKAQIKESLRAEL |
| | 75 | |
| 361 | >US20170081409A1_ | LDSPDRPWNPPTFSPALL |
| | 76 | |
| 362 | >US20170081409A1_ | DSPDRPWNPP |
| | 77 | |
| 363 | >US20170081409A1_ | EVPTAHPSP |
| | 78 | |
| 364 | >US20170081409A1_ | ISLAPKAQ |
| | 79 | |

[0400] In some embodiments, the IL-2 mutein portion of the bispecific IL-2 cytokine fusion comprises substitutions L801F, R81D, L85V, I86V, and I92F, numbered in accordance with human wild-type IL-2 (SEQ ID NO:2) is used in combination with an anti-PD-1 antibody or inhibitor. In some embodiments, the IL-2 mutein comprising substitutions L80F, R81D, L85V, 186V, and I92F, numbered in accordance with human wild-type IL-2 (SEQ ID NO:2) is used in combination with nivolumab. In some embodiments, the IL-2 mutein comprising substitutions L80F, R81D, L85V, I86V, and I92F, numbered in accordance with human wild-type IL-2 (SEQ ID NO:2) is used in combination with pembrolizumab. In some embodiments, the IL-2 mutein comprising substitutions L80F, R81D, L85V, I86V, and I92F, numbered in accordance with human wild-type IL-2 (SEQ ID NO:2) is used in combination with cemiplimab. In some embodiments, the IL-2 mutein comprising substitutions L80F, R81D, L85V, I86V, and I92F, numbered in accordance with human wild-type IL-2 (SEQ ID NO:2) is used in combination BMS-936558. In some embodiments, the IL-2 mutein comprising substitutions L80F, R81D, L85V, I86V, and I92F, numbered in accordance with human wild-type IL-2 (SEQ ID NO:2) is used in combination MDX-1106. In some embodiments, the IL-2 mutein comprising substitutions L80F, R81D, L85V, I86V, and I92F, numbered in accordance with human wild-type IL-2 (SEQ ID NO:2) is used in combination ONO-4538. In some embodiments, the IL-2 mutein comprising substitutions L80F, R81D, L85V, I86V, and I92F, numbered in accordance with human wild-type IL-2 (SEQ ID NO:2) is used in combination AMP224. In some embodiments, the IL-2 mutein comprising substitutions L80F, R81D, L85V, 186V, and I92F, numbered in accordance with human wild-type IL-2 (SEQ ID NO:2) is used in combination CT-011. In some embodiments, the IL-2 mutein comprising substitutions L80F, R81D, L85V, I86V, and I92F, numbered in accordance with human wild-type IL-2 (SEQ ID NO:2) is used in combination MK-3475. In some embodiments, the IL-2 mutein further comprises F42A substitution, wherein numbering is in accordance with the wild-type human IL-2 of SEQ ID NO:2. In some embodiments, the IL-2 mutein further comprises Y45A substitution, wherein numbering is in accordance with the wild-type human IL-2 of SEQ ID NO:2. In some embodiments, the IL-2 mutein further comprises E62A substitution, wherein numbering is in accordance with the wild-type human IL-2 of SEQ ID NO:2.

[0401] In some embodiments, the IL-2 mutein of the bispecific IL-2 cytokine fusion comprises substitutions L80F, R81D, L85V, I86V, and I92F, numbered in accordance with human wild-type IL-2 (SEQ ID NO:2) is used in combination with any of the referenced antibodies. In some embodiments, the IL-2 mutein further comprises F42A substitution, wherein numbering is in accordance with the wild-type human IL-2 of SEQ ID NO:2. In some embodiments, the IL-2 mutein further comprises Y45A substitution, wherein numbering is in accordance with the wild-type human IL-2 of SEQ ID NO:2. In some embodiments, the IL-2 mutein further comprises E62A substitution, wherein numbering is in accordance with the wild-type human IL-2 of SEQ ID NO:2. In some embodiments, the IL-2 mutein further comprises E62A substitution, wherein numbering is in accordance with the wild-type human IL-2 of SEQ ID NO:2. In some embodiments, the IL-2 mutein is any IL-2 mutein or variant disclosed herein. In some embodiments, the IL-2 mutein sequence is 90% identical to any one of SEQ ID NO:2 or SEQ ID NO:6 through SEQ ID NO:10 or SEQ ID NO:16. In some embodiments, the IL-2 mutein incudes any one of 5-1 SEQ ID NO:5; 5-2 SEQ ID NO:6; 6-6 SEQ ID NO:7; A2 SEQ ID NO:8; B1 SEQ ID NO:9; B11 SEQ ID NO:10; C5 SEQ ID NO:11; D10 SEQ ID NO: 12; E10 SEQ ID NO: 13; G8 SEQ ID NO:14; H4 SEQ ID NO:15; and H9 SEQ ID NO: 16. In some embodiments, the IL-2 mutein used in combination with an anti-PD-1 antibody is a fusion mutein as described herein. In some embodiments, the IL-2 mutein used in combination with an anti-PD-1 antibody is a fusion mutein as described herein.

[0402] J. Anti-Pd-L1 Antibodies and Combinations

[0403] In some embodiments, any of the IL-2 muteins or the bispecific IL-2 cytokine fusions described herein can be used in combination with an anti-PD-1 antibody. There are three approved anti-PD-L1 antibodies, atezolizumab (TECENTRIQ®; MPDL3280A), avelumab (BAVENCIO®; MSB001071 8C), and Durvalumab (MED14736), as well as other anti-PD-L1 antibodies in development. Numerous anti-PD-L1 antibodies are available and many more in development which can be used in combination with the IL-2 muteins as described herein. In some embodiments, the PD-L1 antibody is one described in U.S. Patent Publication No. 2017/0281764 as well as International Patent Publication No. WO 2013/079174 (avelumab) and WO 2010/077634 (or U.S. Patent Application No. 20160222117 or U.S. Pat. No. 8,217,149; atezolizumab). In some embodiments, the PD-L1 antibody comprises a heavy chain sequence of SEQ ID NO:34 and a light chain sequence of SEQ ID NO:36 (from US 2017/281764). In some embodiments, the PD-L1 antibody is atezolizumab (TECENTRIQ®; MPDL3280A; IMpower110). In some embodiments, the PD-L1 antibody is avelumab (BAVENCIO®; MSB001071 8C). In some embodiments, the PD-L1 antibody is durvalumab (MEDI4736). In some embodiments, the PD-L1 antibody includes, for example, Atezolizumab (IMpower133), BMS-936559/MDX-1105, and/or RG-7446/MPDL3280A, and/or YW243.55.S70, as well as any of the exemplary anti-PD-L1 antibodies provided herein in FIG. 17. In some embodiments, the IL-2 mutein comprising substitutions L80F, R81D, L85V, 186V, and I92F, numbered in accordance with human wild-type IL-2 (SEQ ID NO:2) is used in combination with any of the referenced antibodies. In some embodiments, the IL-2 mutein further comprises F42A substitution, wherein numbering is in accordance with the wild-type human IL-2 of SEQ ID NO:2. In some embodiments, the IL-2 mutein further comprises Y45A substitution, wherein numbering is in accordance with the wild-type human IL-2 of SEQ ID NO:2. In some embodiments, the IL-2 mutein further comprises E62A substitution, wherein numbering is in accordance with the wild-type human IL-2 of SEQ ID NO:2. In some embodiments, the IL-2 mutein further comprises E62A substitution, wherein numbering is in accordance with the wild-type human IL-2 of SEQ ID NO:2. In some embodiments, the IL-2 mutein is any IL-2 mutein or variant disclosed herein. In some embodiments, the IL-2 mutein sequence is 90% identical to any one of SEQ ID NO:2 or SEQ ID NO:6 through SEQ ID NO:10 or SEQ ID NO:16. In some embodiments, the IL-2 mutein incudes any one of 5-1 SEQ ID NO:5; 5-2 SEQ ID NO:6; 6-6 SEQ ID NO:7; A2 SEQ ID NO:8; B1 SEQ ID NO:9; B11 SEQ ID NO: 10; C5 SEQ ID NO:11; D10 SEQ ID NO: 12; E10 SEQ ID NO:13; G8 SEQ ID NO:14; H4 SEQ ID NO: 15; and H9 SEQ ID NO:16. In some embodiments, the IL-2 mutein used in combination with an anti-PD-L1 antibody is a fusion mutein as described herein. In some embodiments, the IL-2 mutein used in combination with an anti-PD-L1 antibody is a fusion mutein as described herein.

[0404] K. Other Immunotherapy Combinations

[0405] Other antibodies and/or immunotherapies for use according to the methods of the present invention include but are not limited to, anti-CTLA4 mAbs, such as ipilimumab, tremelimumab; anti-PD-L1 antagonistic antibodies such as BMS-936559/MDX-1105, MEDI4736, RG-7446/MPDL3280A; anti-LAG-3 such as IMP-321; agonistic antibodies targeting immunostimulatory proteins, including anti-CD40 mAbs such as CP-870,893, lucatumumab, dacetuzumab; anti-CD137 mAbs (anti-4-1-BB antibodies) such as BMS-663513 urelumab (anti-4-1BB antibody; see, for example, U.S. Pat. Nos. 7,288,638 and 8,962,804, incorporated by reference herein in their entireties); lirilumab (anti-KIR mAB; IPH2102/BMS-986015; blocks NK cell inhibitory receptors) and PF-05082566 (utomilumab; see, for example, U.S. Pat. Nos. 8,821,867; 8,337,850; and 9,468,678, as well as International Patent Application Publication No. WO 2012/032433, incorporated by reference herein in their entireties); anti-OX40 mAbs (see, for example, WO 2006/029879 or WO 2010/096418, incorporated by reference herein in their entireties); anti-GITR mAbs such as TRX518 (see, for example, U.S. Pat. No. 7,812,135, incorporated by reference herein in its entirety); anti-CD27 mAbs, such as varlilumab CDX-1127 (see, for example, WO 2016/145085 and U.S. Patent Publication Nos. US 2011/0274685 and US 2012/0213771, incorporated by reference herein in their entireties) anti-ICOS mAbs (for example, MEDI-570, JTX-2011, and anti-TIM-3 antibodies (see, for example, WO 2013/006490 or U.S. Patent Publication No US 2016/0257758, incorporated by reference herein in their entireties). In some embodiments, the IL-2 mutein comprising substitutions L80F, R81D, L85V, 186V, and I92F, numbered in accordance with human wild-type IL-2 (SEQ ID NO:2) is used in combination with any of the referenced antibodies. In some embodiments, the IL-2 mutein further comprises F42A substitution, wherein numbering is in accordance with the wild-type human IL-2 of SEQ ID NO:2. In some embodiments, the IL-2 mutein further comprises Y45A substitution, wherein numbering is in accordance with the wild-type human IL-2 of SEQ ID NO:2. In some embodiments, the IL-2 mutein further comprises E62A substitution, wherein numbering is in accordance with the wild-type human IL-2 of SEQ ID NO:2. In some embodiments, the IL-2 mutein further comprises E62A substitution, wherein numbering is in accordance with the wild-type human IL-2 of SEQ ID NO:2. In some embodiments, the IL-2 mutein is any IL-2 mutein or variant disclosed herein. In some embodiments, the IL-2 mutein sequence is 90% identical to any one of SEQ ID NO:2 or SEQ ID NO:6 through SEQ ID NO: 10 or SEQ ID NO:16. In some embodiments, the IL-2 mutein incudes any one of 5-1 SEQ ID NO: 5; 5-2 SEQ ID NO: 6; 6-6 SEQ ID NO:7; A2 SEQ ID NO:8; B1 SEQ ID NO:9; B11 SEQ ID NO: 10; C5 SEQ ID NO: 11; D10 SEQ ID NO: 12; E10 SEQ ID NO: 13; G8 SEQ ID NO: 14; H4 SEQ ID NO: 15; and H9 SEQ ID NO: 16.

[0406] Other antibodies can also include monoclonal antibodies to prostate cancer, ovarian cancer, breast cancer, endometrial cancer, multiple myeloma, melanoma, lymphomas, lung cancers including small cell lung cancer, kidney cancer, colorectal cancer, pancreatic cancer, gastric cancer, brain cancer (see, generally www.clinicaltrials.gov). In some embodiments, the IL-2 mutein comprising substitutions L80F, R81D, L85V, 186V, and I92F, numbered in accordance with human wild-type IL-2 (SEQ ID NO:2) is used in combination with any of the referenced antibodies. In some embodiments, the IL-2 mutein further comprises F42A substitution, wherein numbering is in accordance with the wild-type human IL-2 of SEQ ID NO:2. In some embodiments, the IL-2 mutein further comprises Y45A substitution, wherein numbering is in accordance with the wild-type human IL-2 of SEQ ID NO:2. In some embodiments, the IL-2 mutein further comprises E62A substitution, wherein numbering is in accordance with the wild-type human IL-2 of SEQ ID NO:2. In some embodiments, the IL-2 mutein is any IL-2 mutein or variant disclosed herein. In some embodiments, the IL-2 mutein sequence is 90% identical to any one of SEQ ID NO:2 or SEQ ID NO:6 through SEQ ID NO:10 or SEQ ID NO:16. In some embodiments, the IL-2 mutein incudes any one of 5-1 SEQ ID NO:5; 5-2 SEQ ID NO: 6; 6-6 SEQ ID NO: 7; A2 SEQ ID NO: 8; B1 SEQ ID NO: 9; B11 SEQ ID NO: 10; C5 SEQ ID NO: 11; D10 SEQ ID NO: 12; E10 SEQ ID NO: 13; G8 SEQ ID NO: 14; H4 SEQ ID NO: 15; and H9 SEQ ID NO: 16.

[0407] Antibodies can also include antibodies for antibody-dependent cell-mediated cytotoxicity (ADCC). In some embodiments, the IL-2 mutein comprising substitutions L80F, R81D, L85V, 186V, and I92F, numbered in accordance with human wild-type IL-2 (SEQ ID NO:2) is used in combination with an antibody for antibody-dependent cell-mediated cytotoxicity (ADCC). In some embodiments, the IL-2 mutein further comprises F42A substitution, wherein numbering is in accordance with the wild-type human IL-2 of SEQ ID NO:2. In some embodiments, the IL-2 mutein further comprises Y45A substitution, wherein numbering is in accordance with the wild-type human IL-2 of SEQ ID NO:2. In some embodiments, the IL-2 mutein further comprises E62A substitution, wherein numbering is in accordance with the wild-type human IL-2 of SEQ ID NO:2.

[0408] L. Methods of Treatment

[0409] In some embodiments, subject IL-2 muteins and/or bispecific IL-2 cytokine fusions, and/or nucleic acids expressing them, can be administered to a subject to treat a disorder associated with abnormal apoptosis or a differentiative process (e.g., cellular proliferative disorders or cellular differentiative disorders, such as cancer, by, for example, producing an active or passive immunity). In the treatment of such diseases, the disclosed IL-2 muteins may possess advantageous properties, such as reduced vascular leak syndrome. In some embodiments, the IL-2 mutein is any IL-2 mutein or variant disclosed herein. In some embodiments, the IL-2 mutein sequence is 90% identical to any one of SEQ ID NO:2 or SEQ ID NO:6 through SEQ ID NO: 10 or SEQ ID NO:16. In some embodiments, the IL-2 mutein incudes any one of 5-1 SEQ ID NO:5; 5-2 SEQ ID NO:6; 6-6 SEQ ID NO:7; A2 SEQ ID NO:8; B1 SEQ ID NO:9; B11 SEQ ID NO:10; C5 SEQ ID NO: 11; D10 SEQ ID NO: 12; E10 SEQ ID NO: 13; G8 SEQ ID NO: 14; H4 SEQ ID NO:15; and H9 SEQ ID NO:16. In some embodiments, the substitutions in the IL-2 mutein comprise L80F, R81D, L85V, I86V, and I92F, numbered in accordance with wild-type human IL-2 of SEQ ID NO:2. In some embodiments, the IL-2 mutein is a fusion protein. In some embodiments, the IL-2 mutein is associated with and/or expressed by a CAR-T construct. In some embodiments, the IL-2 mutein is expressed by and/or associated with an oncolytic virus.

[0410] Examples of cellular proliferative and/or differentiative disorders include cancer (e.g., carcinoma, sarcoma, metastatic disorders or hematopoietic neoplastic disorders, e.g., leukemias). A metastatic tumor can arise from a multitude of primary tumor types, including but not limited to those of prostate cancer, ovarian cancer, breast cancer, endometrial cancer, multiple myeloma, melanoma, lymphomas, lung cancers including small cell lung cancer, kidney cancer, liver cancer, colon cancer, colorectal cancer, pancreatic cancer, gastric cancer, and brain cancer.

[0411] The mutant IL-2 polypeptides can be used to treat patients who have, who are suspected of having, or who may be at high risk for developing any type of cancer, including renal carcinoma or melanoma, or any viral disease. Exemplary carcinomas include those forming from tissue of the cervix, lung, prostate, breast, head and neck, colon and ovary. The term also includes carcinosarcomas, which include malignant tumors composed of carcinomatous and sarcomatous tissues.

[0412] Additional examples of proliferative disorders include hematopoietic neoplastic disorders.

[0413] Alternatively, or in addition to methods of direct administration to patients, in some embodiments, mutant IL-2 polypeptides can be used in ex vivo methods. For example, cells (e.g., peripheral blood lymphocytes or purified populations of lymphocytes isolated from a patient and placed or maintained in culture) can be cultured in vitro in culture medium and the contacting step can be affected by adding the IL-2 mutant to the culture medium. The culture step can include further steps in which the cells are stimulated or treated with other agents, e.g., to stimulate proliferation, or to expand a population of cells that is reactive to an antigen of interest (e.g., a cancer antigen or a viral antigen). The cells are then administered to the patient after they have been treated.

[0414] Anti-PD-1 antibodies for use in combination with the IL-2 muteins disclosed herein for the treatment methods include but are not limited to nivolumab, BMS-936558, MDX-1106, ONO-4538, AMP224, CT-011, and MK-3475.

[0415] In some embodiments, the IL-2 mutein of the bispecific IL-2 cytokine fusion comprises substitutions L80F, R81D, L85V, I86V, and I92F, numbered in accordance with human wild-type IL-2 (SEQ ID NO:2) is used in combination with an anti-PD-1 antibody or inhibitor for the treatment of cancer. In some embodiments, the IL-2 mutein comprising substitutions L80F, R81D, L85V, I86V, and I92F, numbered in accordance with human wild-type IL-2 (SEQ ID NO:2) is used in combination with nivolumab for the treatment of cancer. In some embodiments, the IL-2 mutein comprising substitutions L80F, R81D, L85V, I86V, and I92F, numbered in accordance with human wild-type IL-2 (SEQ ID NO:2) is used in combination BMS-936558 for the treatment of cancer. In some embodiments, the IL-2 mutein comprising substitutions L80F, R81D, L85V, 186V, and I92F, numbered in accordance with human wild-type IL-2 (SEQ ID NO:2) is used in combination MDX-1106 for the treatment of cancer. In some embodiments, the IL-2 mutein comprising substitutions L80F, R81D, L85V, I86V, and I92F, numbered in accordance with human wild-type IL-2 (SEQ ID NO:2) is used in combination ONO-4538 for the treatment of cancer. In some embodiments, the IL-2 mutein comprising substitutions L80F, R81D, L85V, I86V, and I92F, numbered in accordance with human wild-type IL-2 (SEQ ID NO:2) is used in combination AMP224 for the treatment of cancer. In some embodiments, the IL-2 mutein comprising substitutions L80F, R81D, L85V, I86V, and I92F, numbered in accordance with human wild-type IL-2 (SEQ ID NO:2) is used in combination CT-011 for the treatment of cancer. In some embodiments, the IL-2 mutein comprising substitutions L80F, R81D, L85V, I86V, and I92F, numbered in accordance with human wild-type IL-2 (SEQ ID NO:2) is used in combination MK-3475 for the treatment of cancer. In some embodiments, the IL-2 mutein further comprises F42A substitution, wherein numbering is in accordance with the wild-type human IL-2 of SEQ ID NO:2. In some embodiments, the IL-2 mutein further comprises K43N substitution, wherein numbering is in accordance with the wild-type human IL-2 of SEQ ID NO:2. In some embodiments, the IL-2 mutein further comprises F42A substitution, wherein numbering is in accordance with the wild-type human IL-2 of SEQ ID NO:2. In some embodiments, the IL-2 mutein further comprises Y45A substitution, wherein numbering is in accordance with the wild-type human IL-2 of SEQ ID NO:2. In some embodiments, the IL-2 mutein further comprises E62A substitution, wherein numbering is in accordance with the wild-type human IL-2 of SEQ ID NO:2.

[0416] In some embodiments, the IL-2 mutein of the bispecific IL-2 cytokine fusion comprises substitutions L80F, R81D, L85V, I86V, and I92F, numbered in accordance with human wild-type IL-2 (SEQ ID NO:2) is used in combination with an antibody and/or immunotherapy including but not limited to, anti-CTLA4 mAbs, such as ipilimumab, tremelimumab; anti-PD-L1 antagonistic antibodies such as BMS-936559/MDX-1105, MEDI4736, RG-7446/MPDL3280A; anti-LAG-3 such as IMP-321; agonistic antibodies targeting immunostimulatory proteins, including anti-CD40 mAbs such as CP-870,893, lucatumumab, dacetuzumab; anti-CD137 mAbs (anti-4-1-BB antibodies) such as BMS-663513 urelumab (anti-4-1BB antibody; see, for example, U.S. Pat. Nos. 7,288,638 and 8,962,804, incorporated by reference herein in their entireties); lirilumab (anti-KIR mAB; IPH2102/BMS-986015; blocks NK cell inhibitory receptors) and PF-05082566 (utomilumab; see, for example, U.S. Pat. Nos. 8,821,867; 8,337,850; and 9,468,678, as well as International Patent Application Publication No. WO 2012/032433, incorporated by reference herein in their entireties); anti-OX40 mAbs (see, for example, WO 2006/029879 or WO 2010/096418, incorporated by reference herein in their entireties); anti-GITR mAbs such as TRX518 (see, for example, U.S. Pat. No. 7,812,135, incorporated by reference herein in its entirety); anti-CD27 mAbs, such as varlilumab CDX-1127 (see, for example, WO 2016/145085 and U.S. Patent Publication Nos. US 2011/0274685 and US 2012/0213771, incorporated by reference herein in their entireties) anti-ICOS mAbs (for example, MEDI-570, JTX-2011, and anti-TIM-3 antibodies (see, for example, WO 2013/006490 or U.S. Patent Publication No US 2016/0257758, incorporated by reference herein in their entireties) for the treatment of cancer.

[0417] In some embodiments, the IL-2 mutein of the bispecific IL-2 cytokine fusion comprises substitutions L80F, R81D, L85V, I86V, and I92F, numbered in accordance with human wild-type IL-2 (SEQ ID NO:2) is used in combination with another antibody which can include monoclonal antibodies to prostate cancer, ovarian cancer, breast cancer, endometrial cancer, multiple myeloma, melanoma, lymphomas, lung cancers including small cell lung cancer, kidney cancer, colorectal cancer, pancreatic cancer, gastric cancer, brain cancer (see, generally www.clinicaltrials.gov), for the treatment of cancer.

[0418] In some embodiments, the IL-2 mutein of the bispecific IL-2 cytokine fusion comprises substitutions L80F, R81D, L85V, I86V, and I92F, numbered in accordance with human wild-type IL-2 (SEQ ID NO:2) is used in combination with antibodies for antibody-dependent cell-mediated cytotoxicity (ADCC) for the treatment of cancer.

[0419] M. Pharmaceutical Compositions and Methods of Administration

[0420] In some embodiments, subject IL-2 muteins and/or the bispecific IL-2 cytokine fusions and nucleic acids can be incorporated into compositions, including pharmaceutical compositions. Such compositions typically include the polypeptide or nucleic acid molecule and a pharmaceutically acceptable carrier. Such compositions can also comprise anti-PD-1 antibodies. In some embodiments, the composition comprises an IL-2 mutein that is a fusion protein and/or is associated with a CAR-T construct and/or expressed by or associated with an oncolytic virus.

[0421] The anti-PD-1 antibodies and IL-2 muteins and/or the bispecific IL-2 cytokine fusions can be administered as a co-composition, simultaneously as two separate compositions, and/or sequentially as two separate compositions. In some embodiments, the anti-PD-1 antibody or inhibitor and IL-2 mutein are administered together as a single co-composition (i.e., co-formulated). In some embodiments, the anti-PD-1 antibody or inhibitor and IL-2 mutein are administered simultaneously as two separate compositions (i.e., separate formulations). In some embodiments, the anti-PD-1 antibody or inhibitor and IL-2 mutein are administered sequentially as separate compositions (i.e., separate formulations). In some embodiments, when the anti-PD-1 antibody or inhibitor and IL-2 mutein are administered sequentially as separate compositions, the anti-PD-1 antibody or inhibitor is administered before the IL-2 mutein. In some embodiments, when the anti-PD-1 antibody or inhibitor and IL-2 mutein are administered sequentially as separate compositions, the IL-2 mutein is administered before the anti-PD-1 antibody or inhibitor. In some embodiments, the anti-PD-1 antibodies include but are not limited to nivolumab, BMS-936558, MDX-1106, ONO-4538, AMP224, CT-011, and MK-3475. In some embodiments, the IL-2 mutein is the IL-2 mutein comprising substitutions L80F, R81D, L85V, I86V, and I92F, numbered in accordance with human wild-type IL-2 (SEQ ID NO:2). In some embodiments, the IL-2 mutein further comprises F42A substitution, wherein numbering is in accordance with the wild-type human IL-2 of SEQ ID NO:2. In some embodiments, the IL-2 mutein further comprises K43N substitution, wherein numbering is in accordance with the wild-type human IL-2 of SEQ ID NO:2. In some embodiments, the IL-2 mutein further comprises F42A substitution, wherein numbering is in accordance with the wild-type human IL-2 of SEQ ID NO:2. In some embodiments, the IL-2 mutein further comprises Y45A substitution, wherein numbering is in accordance with the wild-type human IL-2 of SEQ ID NO:2. In some embodiments, the IL-2 mutein further comprises E62A substitution, wherein numbering is in accordance with the wild-type human IL-2 of SEQ ID NO:2.

[0422] The other immunotherapy agents as described and IL-2 muteins and/or the bispecific IL-2 cytokine fusions can be administered as a co-composition, simultaneously as two separate compositions, and/or sequentially as two separate compositions. In some embodiments, the other immunotherapy agents and IL-2 mutein are administered together as a single co-composition (i.e., co-formulated). In some embodiments, the other immunotherapy agents and IL-2 mutein are administered simultaneously as two separate compositions (i.e., separate formulations). In some embodiments, the other immunotherapy agents and IL-2 mutein are administered sequentially as separate compositions (i.e., separate formulations). In some embodiments, when the other immunotherapy agents and IL-2 mutein are administered sequentially as separate compositions, the anti-PD-1 antibody or inhibitor is administered before the IL-2 mutein. In some embodiments, when other immunotherapy agents and IL-2 mutein are administered sequentially as separate compositions, the IL-2 mutein is administered before other immunotherapy agents. In some embodiments, the IL-2 mutein is the IL-2 mutein comprising substitutions L80F, R81D, L85V, 186V, and I92F, numbered in accordance with human wild-type IL-2 (SEQ ID NO:2). In some embodiments, the IL-2 mutein further comprises F42A substitution, wherein numbering is in accordance with the wild-type human IL-2 of SEQ ID NO:2. In some embodiments, the IL-2 mutein further comprises K43N substitution, wherein numbering is in accordance with the wild-type human IL-2 of SEQ ID NO:2. In some embodiments, the IL-2 mutein further comprises F42A substitution, wherein numbering is in accordance with the wild-type human IL-2 of SEQ ID NO:2. In some embodiments, the IL-2 mutein further comprises Y45A substitution, wherein numbering is in accordance with the wild-type human IL-2 of SEQ ID NO:2. In some embodiments, the IL-2 mutein further comprises E62A substitution, wherein numbering is in accordance with the wild-type human IL-2 of SEQ ID NO:2.

[0423] A pharmaceutical composition is formulated to be compatible with its intended route of administration. The anti-PD-1 antibodies and/or mutant IL-2 polypeptides (including bispecific IL-2 cytokine fusions) of the invention may be given orally, but it is more likely that they will be administered through a parenteral route, including for example intravenous administration. Examples of parenteral routes of administration include, for example, intravenous, intradermal, subcutaneous, transdermal (topical), transmucosal, and rectal administration. Solutions or suspensions used for parenteral application can include the following components: a sterile diluent such as water for injection, saline solution, fixed oils, polyethylene glycols, glycerine, propylene glycol or other synthetic solvents; antibacterial agents such as benzyl alcohol or methyl parabens; antioxidants such as ascorbic acid or sodium bisulfite; chelating agents such as ethylenediaminetetraacetic acid; buffers such as acetates, citrates or phosphates and agents for the adjustment of tonicity such as sodium chloride or dextrose. pH can be adjusted with acids or bases, such as mono- and/or di-basic sodium phosphate, hydrochloric acid or sodium hydroxide (e.g., to a pH of about 7.2-7.8, e.g., 7.5). The parenteral preparation can be enclosed in ampoules, disposable syringes or multiple dose vials made of glass or plastic.

[0424] Pharmaceutical compositions suitable for injectable use include sterile aqueous solutions (where water soluble) or dispersions and sterile powders for the extemporaneous preparation of sterile injectable solutions or dispersion. For intravenous administration, suitable carriers include physiological saline, bacteriostatic water, Cremophor EL™. (BASF, Parsippany, N.J.) or phosphate buffered saline (PBS). In all cases, the composition should be sterile and should be fluid to the extent that easy syringability exists. It should be stable under the conditions of manufacture and storage and must be preserved against the contaminating action of microorganisms such as bacteria and fungi. The carrier can be a solvent or dispersion medium containing, for example, water, ethanol, polyol (for example, glycerol, propylene glycol, and liquid polyethylene glycol, and the like), and suitable mixtures thereof. The proper fluidity can be maintained, for example, by the use of a coating such as lecithin, by the maintenance of the required particle size in the case of dispersion and by the use of surfactants, e.g., sodium dodecyl sulfate. Prevention of the action of microorganisms can be achieved by various antibacterial and antifungal agents, for example, parabens, chlorobutanol, phenol, ascorbic acid, thimerosal, and the like. In many cases, it will be preferable to include isotonic agents, for example, sugars, polyalcohols such as mannitol, sorbitol, sodium chloride in the composition. Prolonged absorption of the injectable compositions can be brought about by including in the composition an agent which delays absorption, for example, aluminum monostearate and gelatin.

[0425] Sterile injectable solutions can be prepared by incorporating the active compound in the required amount in an appropriate solvent with one or a combination of ingredients enumerated above, as required, followed by filtered sterilization. Generally, dispersions are prepared by incorporating the active compound into a sterile vehicle, which contains a basic dispersion medium and the required other ingredients from those enumerated above. In the case of sterile powders for the preparation of sterile injectable solutions, the preferred methods of preparation are vacuum drying and freeze-drying which yields a powder of the active ingredient plus any additional desired ingredient from a previously sterile-filtered solution thereof.

[0426] Oral compositions, if used, generally include an inert diluent or an edible carrier. For the purpose of oral therapeutic administration, the active compound can be incorporated with excipients and used in the form of tablets, troches, or capsules, e.g., gelatin capsules. Oral compositions can also be prepared using a fluid carrier for use as a mouthwash. Pharmaceutically compatible binding agents, and/or adjuvant materials can be included as part of the composition. The tablets, pills, capsules, troches and the like can contain any of the following ingredients, or compounds of a similar nature: a binder such as microcrystalline cellulose, gum tragacanth or gelatin; an excipient such as starch or lactose, a disintegrating agent such as alginic acid, Primogel™, or corn starch; a lubricant such as magnesium stearate or Sterotes™; a glidant such as colloidal silicon dioxide; a sweetening agent such as sucrose or saccharin; or a flavoring agent such as peppermint, methyl salicylate, or orange flavoring.

[0427] In the event of administration by inhalation, anti-PD-1 antibodies and/or IL-2 muteins, or the nucleic acids encoding them, are delivered in the form of an aerosol spray from pressured container or dispenser which contains a suitable propellant, e.g., a gas such as carbon dioxide, or a nebulizer. Such methods include those described in U.S. Pat. No. 6,468,798.

[0428] Systemic administration of the anti-PD-1 antibodies and/or IL-2 muteins or nucleic acids can also be by transmucosal or transdermal means. For transmucosal or transdermal administration, penetrants appropriate to the barrier to be permeated are used in the formulation. Such penetrants are generally known in the art, and include, for example, for transmucosal administration, detergents, bile salts, and fusidic acid derivatives. Transmucosal administration can be accomplished through the use of nasal sprays or suppositories. For transdermal administration, the active compounds are formulated into ointments, salves, gels, or creams as generally known in the art.

[0429] In some embodiments, compounds (anti-PD-1 antibodies and/or mutant IL-2 polypeptides or nucleic acids) can also be prepared in the form of suppositories (e.g., with conventional suppository bases such as cocoa butter and other glycerides) or retention enemas for rectal delivery.

[0430] In some embodiments, compounds (subject IL-2 muteins or nucleic acids) can also be administered by transfection or infection using methods known in the art, including but not limited to the methods described in McCaffrey et al. (Nature 418:6893, 2002), Xia et al. (Nature Biotechnol. 20: 1006-1010, 2002), or Putnam (Am. J. Health Syst. Pharm. 53: 151-160, 1996, erratum at Am. J. Health Syst. Pharm. 53:325, 1996).

[0431] In one embodiment, the anti-PD-1 antibodies and/or IL-2 muteins and/or bispecific IL-2 cytokine fusions or nucleic acids are prepared with carriers that will protect the anti-PD-1 antibodies and/or mutant IL-2 polypeptides against rapid elimination from the body, such as a controlled release formulation, including implants and microencapsulated delivery systems. Biodegradable, biocompatible polymers can be used, such as ethylene vinyl acetate, polyanhydrides, polyglycolic acid, collagen, polyorthoesters, and polylactic acid. Such formulations can be prepared using standard techniques. The materials can also be obtained commercially from Alza Corporation and Nova Pharmaceuticals, Inc. Liposomal suspensions (including liposomes targeted to infected cells with monoclonal antibodies to viral antigens) can also be used as pharmaceutically acceptable carriers. These can be prepared according to methods known to those skilled in the art, for example, as described in U.S. Pat. No. 4,522,811.

[0432] Dosage, toxicity and therapeutic efficacy of such anti-PD-1 antibodies, IL-2 muteins, or nucleic acids compounds can be determined by standard pharmaceutical procedures in cell cultures or experimental animals, e.g., for determining the LD₅₀ (the dose lethal to 50% of the population) and the ED₅₀ (the dose therapeutically effective in 50% of the population). The dose ratio between toxic and therapeutic effects is the therapeutic index and it can be expressed as the ratio LD₅₀/ED₅₀. Compounds that exhibit high therapeutic indices are preferred. While compounds that exhibit toxic side effects may be used, care should be taken to design a delivery system that targets such compounds to the site of affected tissue in order to minimize potential damage to uninfected cells and, thereby, reduce side effects.

[0433] The data obtained from the cell culture assays and animal studies can be used in formulating a range of dosage for use in humans. The dosage of such compounds lies preferably within a range of circulating concentrations that include the ED₅₀ with little or no toxicity. The dosage may vary within this range depending upon the dosage form employed and the route of administration utilized. For any compound used in the method of the invention, the therapeutically effective dose can be estimated initially from cell culture assays. A dose may be formulated in animal models to achieve a circulating plasma concentration range that includes the IC₅₀ (i.e., the concentration of the test compound which achieves a half-maximal inhibition of symptoms) as determined in cell culture. Such information can be used to more accurately determine useful doses in humans. Levels in plasma may be measured, for example, by high performance liquid chromatography.

[0434] As defined herein, a therapeutically effective amount of a subject IL-2 mutein and/or of the bispecific IL-2 cytokine fusions (i.e., an effective dosage) and/or the anti-PD-1 antibody or inhibitor depends on the polypeptide or antibody selected. In some embodiments, single dose amounts of the IL-2 mutein can be in the range of approximately 0.001 mg/kg to 0.1 mg/kg of patient body weight can be administered. In some embodiments, single dose amounts of the anti-PD-1 antibody or inhibitor can be in the range of approximately 1 mg/kg to 20 mg/kg, or about 5 mg/kg to about 15 mg/kg, or about 10 mg/kg of patient body weight can be administered. In some embodiments, doses of the anti-PD-1 antibody or inhibitor and/or the IL-2 mutein of about 0.005 mg/kg, 0.01 mg/kg, 0.025 mg/kg, 0.05 mg/kg, 0.1 mg/kg, 0.25 mg/kg, 0.5 mg/kg, 1.0 mg/kg, 5.0 mg/kg, 10.0 mg/kg may be administered. In some embodiments, 600,000 IU/kg is administered (IU can be determined by a lymphocyte proliferation bioassay and is expressed in International Units (IU) as established by the World Health Organization 1St International Standard for Interleukin-2 (human)). The dosage may be similar to, but is expected to be less than, that prescribed for PROLEUKIN®. The compositions can be administered one from one or more times per day to one or more times per week; including once every other day. The skilled artisan will appreciate that certain factors may influence the dosage and timing required to effectively treat a subject, including but not limited to the severity of the disease or disorder, previous treatments, the general health and/or age of the subject, and other diseases present. Moreover, treatment of a subject with a therapeutically effective amount of the subject IL-2 muteins can include a single treatment or, can include a series of treatments. In one embodiment, the compositions are administered every 8 hours for five days, followed by a rest period of 2 to 14 days, e.g., 9 days, followed by an additional five days of administration every 8 hours. In some embodiments, administration is 3 doses administered every 4 days.

[0435] The pharmaceutical compositions can be included in a container, pack, or dispenser together with instructions for administration.

[0436] The following examples are provided to describe certain embodiments of the invention provided herein and are not to be construed to as limiting.

### EXAMPLES

### Example 1: Emergence of Novel Long-Acting Mono- and Bi-Specific IL-2/IL-13 Superkines as Potent Immune Modulators

[0437] This example provides data showing that combination therapy produces robust responses in a dose-dependent fashion.

### BACKGROUND

[0438] Use of IL-2 (Proleukin®) remains limited due to a short half-life, toxicity, and preferential activation of Tregs driven by a high affinity for IL2Ra over IL2RP. To bypass these limitations, we further engineered MDNA109, an IL-2 superkine, to generate MDNA11 by (1) addition of mutations to abrogate IL2Ra binding and (2) fusion with albumin to extend half-life. We also leveraged the versatility of our superkine platforms to engineer long-acting bispecific constructs to simultaneously activate IL-2 signaling (i.e. pro-inflammatory) and suppress IL-4/IL-13 function (i.e., anti-inflammatory) and/or enable accumulation in tumors.

[0439] Materials and Methods: In vitro and in vivo studies included IL-2 signaling in human PBMCs, BLI/Octet binding analyses, PK studies in mice, and efficacy studies in syngeneic tumor models with or without immune checkpoint inhibitors (ICIs). A dose ranging finding study in cynomolgus monkeys (NHP) was performed to characterize the safety and PK/PD profiles of MDNA11.

### Results

[0440] MDNA11 and bispecific constructs displayed enhanced STAT5 signaling in human NK and resting CD8 T cells with diminished Treg activity compared to IL-2. In spite of qwk dosing for two weeks, MDNA11 monotherapy or in combination with ICI demonstrated potent efficacy in a CT26 tumor model, resulting in long-term tumor regression and strong memory response. MDNA11 also inhibited growth of B16F10 melanomas with durable increase in tumor infiltrating CD8 T and NK cells. Preliminary studies with bispecific constructs demonstrated therapeutic responses in both CT26 and B16F10 tumor models. In NHP, MDNA11 induced durable proliferation and expansion of NK and CD8 T cells with limited effects on Tregs. Repeat dose of MDNA11 did not trigger cytokine storm, anti-drug antibody response nor eosinophilia (associated with vascular leak syndrome; VLS). Histopathological evaluation confirmed an absence of pulmonary edema, a major IL-2 induced toxicity.

### Conclusions

[0441] MDNA11 is a long-acting IL-2 superkine with superior potency at activation of naïve CD8 T cells and NK cells, and diminished activity on Tregs. MDNA11 potently inhibited growth of tumors and induced durable regression and strong memory response. Novel bispecific constructs also demonstrated efficacy in these in vivo tumor models. In NHP, MDNA11 induced durable proliferation and expansion of immune effector cells without adverse side effects. These data demonstrate the potency of MDNA11 and underscore the versatility of our superkine platforms to the design of multi-functional therapeutics for immuno-oncological indications.

### Example 2: MDNA132-Fc-MDNA109 (KIH) Bi-Specific Superkine

### Introduction

[0442] MDNA109 is an IL-2 superkine with high selectivity towards the intermediate affinity IL2 receptor (IL2R) consisting of IL-2Rβ(CD122) and IL-2Rγc (CD132) that are expressed on naïve CD8 T-cells and NK cells. MDNA109 is therefore a potent activator of NK and CD8 T cells and can induce a superior anti-cancer response compared to IL-2. However, MDNA109 can still bind to IL-2Rα(CD25) resulting in strong activation of the high affinity IL-2R (IL-2Rαβγc) expressed on immune-suppressive Tregs, therefore impairing the anti-cancer effects of effector T cells. Addition of the FEAA mutations to MDNA109 abolishes binding to CD25 without affecting the binding capacity of MDNA109 to CD122, thereby shifting the balance towards effector immune cells to control or eradicate cancer cells.

[0443] MDNA109 and MDNA109FEAA are versatile molecules that can be coupled to protein scaffolds, such as hIgG1 Fc (with a N297A mutation to suppress effector function), to extend in vivo half-life. These Fc fusion constructs can be further fused with additional cytokines or superkines to generate bi-specific molecules with unique properties and potentially novel functions. Medicenna has to date engineered and manufactured 3 unique bi-specific superkines (with 6 more in development) and will evaluate their therapeutic potential in immuno-oncology. Description and rationale for the development of these bi-specifics are provided in Table 14, and in following sections. The sequences of these bi-specific superkines are listed in Table 15, as well as FIG. 54.

### MDNA132-Fc-MDNA109 (KIH) Bi-Specific Superkine:

[0444] IL13Rα2 is a decoy receptor for the IL-13 cytokine, and while not being bound by theory, is believed to act by dampening IL13-mediated responses in inflamed tissues. It is minimally expressed in normal tissues, but is overexpressed in certain tumors, including glioblastoma, colorectal, pancreatic and basal-like breast tumors. Therefore, IL13Rα2 can be considered as a potential immunotherapeutic target for these cancer types and can be exploited as a means to increase localization of cytokines, such as MDNA109, to tumors sites in order to enhance their therapeutic activities.

[0445] MDNA132 is an IL-13 superkine engineered to selectively bind IL13Rα2 with a 10-fold increase in affinity compared to IL-13. The bi-specific superkine MDNA132-Fc-MDNA109 (see Table 12) was designed with the objective of exploiting MDNA132 for localizing to tumors overexpressing IL13Rα2 in order to enhance the therapeutic effect of MDNA109 by increasing bioavailability at the target sites. Variant constructs containing MDNA109 engineered with the FEAA mutations (e.g., MDNA132-Fc-MDNA109FEAA) were manufactured for testing.

MDNA413-Fc-MDNA109 (KIH) and MDNA109FEAA-Fc-MDNA413 (2:1:2) Bi-Specific Superkines: Interleukin 4 receptor (IL4R) is an important component of the immune system. It is heavily involved in T-cell differentiation, antibody isotype switching and other immune reactions.

[0446] Interestingly, the IL4R can be either classified as Type I or Type II receptor. In the context of type I receptor, the IL4Rα-chain binds to the γc chain (normally expressed on immune cells). In contrast, the type II receptor consists of the IL4Ra chain binding to IL13Rα1. Type II IL4R is particularly relevant to cancer immunotherapy as it is highly prevalent on various tumor types. For instance, it is overexpressed in more than 50% of pancreatic and ovarian tumors, more than 70% of colorectal, breast, head and neck, and lung cancer (i.e. NSCLC). In addition to solid tumors, myeloid derived suppressor cells (MDSCs) and tumor associated macrophage (TAMs), which constitute important components of the tumor microenvironment (TME), are positive for the type II IL4R. In this context, the IL4/IL4R axis induces cancer-promoting phenotypes in TAMs and boost MDSCs among other effects including promotion of proliferation, inhibition of apoptosis, and enhances tumor metabolism. Therefore, inhibition of this pathway could dramatically alter the TME and limit tumor growth.

[0447] MDNA413 is a dual IL4/IL-13 super-antagonist designed to efficiently inhibit IL-4 and IL-13 induced activities by selectively blocking their binding to IL4R Type-II. MDNA413 could therefore inhibit MDSC function and minimize the skewing of TAM toward the immune-suppressive M2 phenotype, thereby shifting the balance in favor of anti-cancer responses. The fusion of MDNA413 to MDNA109-Fc or MDNA109FEAA-Fc (Table 15 as well as FIG. 54) have the combined benefits of diminishing the tumor-promoting functions of MDSC and M2/TAMs while stimulating the anti-cancer activity of effector immune cells (i.e. CD8 T- and NK cells).

TABLE 14
List of bi-specific constructs manufactured and rationale for their production

| Bi-specific | | |
|---|---|---|
| Construct | Description | Activities |
| KIH MDNA132-Fc- | Fc heterodimer in knob- | MDNA109 activates immune effector cells |
| MDNA109 | in-hole (KIH) format | and MDNA132 targets the IL13a2 receptor |
| (1:1:1:) | containing 1 | expressed on solid tumors; MDNA109 |
| | MDNA132 at N- | fusion to MDNA132 will help localizing |
| | terminus, 1 Fc and 1 | MDNA109 to tumor cells; fusion to hIgG1 |
| | MDNA109. Fusion to | Fc* would extend the in vivo half-life of the |
| | Fc via a (G4S)3 linker. | construct. |
| KIH MDNA413-Fc- | Fc heterodimer in knob- | MDNA109 activates immune effector cells |
| MDNA109 | in-hole (KIH) format | while MDNA413 targets the IL-4 type II |
| (1:1:1) | containing 1 | receptor; fusion to MDNA413 may allow |
| | MDNA413 at 7 | MDNA109 localization to the tumor |
| | terminus, 1 Fc and 1 | microenvironment (TME) and inhibition of |
| | MDNA109. Fusion to | the immunosuppressive and tumor- |
| | Fc via a (G4S)3 linker. | promoting cells (M2 polarized tumor |
| | | associated macrophages, MDSCs and Treg |
| | | cells); fusion with hIgG1 Fc* extends the in |
| | | vivo half-life of the compound (Fc |
| MDNA109FEAA- | Fc homodimer | F42A and E62A mutations in |
| Fc-MDNA413 (2:1:2) | containing 2 | MDNA109FEAA decrease affinity for |
| | MDNAFEAA at N- | CD25, therefore limiting stimulation of |
| | terminus, 1 Fc and 2 | Tregs, while retain binding to CD122 for |
| | MDNA413. Fusion to | potent activation of effector immune cells; |
| | Fc via a (G4S)3 | MDNA413 allows for localization to TME |
| | | and inhibition of tumor-promoting cells; |
| | | fusion with hIgG1 Fc* to extend in vivo half- |
| | | life of construct; a 2:1:2 stoichiometry may |
| | | lead to enhanced pharmacology. |

*Fc contains N297A mutation to suppress effector function

TABLE 15
Sequence of bi-specific constructs

| Bi-Specific | |
|---|---|
| Construct | Sequence |
| KIH MDNA132-Fc- | MDNA132-FC-MDNA109 (1:1:1 KIH) |
| MDNA109 | Gene 1: |
| (1:1:1:) | PGPVPPSTAHRELIEELVNITQNQKAPLCNGSMVWSINLTAGMYCAALESLINVSGCSAI |
| Fc heteroduplex | EKTQRMLSGFCPHKVSAGQFSSLHVTGRKIEVAQFVKDLLLHLKKLFKEGQFNGGGGSGG |
| with MW of 80.8 | GGSGGGGSDKTHTCPPCPAPELLGGPSVFLFPPKPKDTLMISRTPEVTCVVVDVSHEDPE |
| KDa | VKFNWYVDGVEVHNAKTKPREEQYASTYRVVSVLTVLHQDWLNGKEYKCKVSNKALPAPI |
| | EKTISKAKGQPREPQVYTLPPCREEMTKNQVSLWCLVKGFYPSDIAVEWESNGQPENNYK |
| | TTPPVLDSDGSFFLYSKLTVDKSRWQQGNVFSCSVMHEALHNHYTQKSLSLSPGGGGSGG |
| | GGGSGGGGSGGGGSAPTSSSTKKTQLQLEHLLLDLQMILNGINNYKNPKLTRMLTFKFYM |
| | PKKATELKHLQCLEEELKPLEEVLNLAQSKNFHFDPRDVVSNINVFVLELKGSETTFMCE |
| | YADETATIVEFLNRWITFCQSIISTLT (SEQ ID NO: 226) |
| | Gene 2: |
| | DKTHTCPPCPAPELLGGPSVFLFPPKPKDTLMISRTPEVTCVVVDVSHEDPEVKFNWYVD |
| | GVEVHNAKTKPREEQYASTYRVVSVLTVLHQDWLNGKEYKCKVSNKALPAPIEKTISKAK |
| | GQPREPQVCTLPPSREEMTKNQVSLSCAVKGFYPSDIAVEWESNGQPENNYKTTPPVLDS |
| | DGSFFLVSKLTVDKSRWQQGNVFSCSVMHEALHNHYTQKSLSLSPGK (SEQ ID NO: |
| | 227) |
| MDNA413-Fc- | MDNA413-Fc-MDNA109 (1:1:1 KIH) |
| MDNA109 (KIH) | Gene1: |
| Fc heteroduplex | PGPVPPSTAVRALIEELINITQNQKAPLCNGSMVWSINRTAGMYCAALESLINVSGCSAI |
| with MW of 80.8 | EKTQDMLSGFCPHKVSAGQFSSLHVRSSKIEVAQFVKDLLFHLRTLFREGQFNGGGGSGG |
| KDa | GGSGGGGSDKTHTCPPCPAPELLGGPSVFLFPPKPKDTLMISRTPEVTCVVVDVSHEDPE |
| | VKFNWYVDGVEVHNAKTKPREEQYASTYRVVSVLTVLHQDWLNGKEYKCKVSNKALPAPI |
| | EKTISKAKGQPREPQVYTLPPCREEMTKNQVSLWCLVKGFYPSDIAVEWESNGQPENNYK |
| | TTPPVLDSDGSFFLYSKLTVDKSRWQQGNVFSCSVMHEALHNHYTQKSLSLSPGGGGSGG |
| | GGGSGGGGSGGGGSAPTSSSTKKTQLQLEHLLLDLQMILNGINNYKNPKLTRMLTFKFYM |
| | PKKATELKHLQCLEEELKPLEEVLNLAQSKNFHFDPRDVVSNINVFVLELKGSETTFMCE |
| | YADETATIVEFLNRWITFCQSIISTLT (SEQ ID NO: 228) |
| | Gene2: |
| | DKTHTCPPCPAPELLGGPSVFLFPPKPKDTLMISRTPEVTCVVVDVSHEDPEVKFNWYVD |
| | GVEVHNAKTKPREEQYASTYRVVSVLTVLHQDWLNGKEYKCKVSNKALPAPIEKTISKAK |
| | GQPREPQVCTLPPSREEMTKNQVSLSCAVKGFYPSDIAVEWESNGQPENNYKTTPPVLDS |
| | DGSFFLVSKLTVDKSRWQQGNVFSCSVMHEALHNHYTQKSLSLSPGK (SEQ ID NO: |
| | 229) |
| MDNA109FEAA- | MDNA109FEAA-Fc-MDNA413 (2:1:2) |
| Fc-MDNA413 | APTSSSTKKTQLQLEHLLLDLQMILNGINNYKNPKLTRMLTAKFYMPKKATELKHLQCLE |
| Fc homodimer with | EALKPLEEVLNLAQSKNFHFDPRDVVSNINVFVLELKGSETTFMCEYADETATIVEFLNR |
| MW of 109.8 KDa | WITFCQSIISTLTGGGGSGGGGSGGGGSDKTHTCPPCPAPELLGGPSVFLFPPKPKDTLM |
| | ISRTPEVTCVVVDVSHEDPEVKFNWYVDGVEVHNAKTKPREEQYASTYRVVSVLTVLHQD |
| | WLNGKEYKCKVSNKALPAPIEKTISKAKGQPREPQVYTLPPSREEMTKNQVSLTCLVKGF |
| | YPSDIAVEWESNGQPENNYKTTPPVLDSDGSFFLYSKLTVDKSRWQQGNVFSCSVMHEAL |
| | HNHYTQKSLSLSPGGGGGSGGGGSGGGGSPGPVPPSTAVRALIEELINITQNQKAPLCNG |
| | SMVWSINRTAGMYCAALESLINVSGCSAIEKTQDMLSGFCPHKVSAGQFSSLHVRSSKIE |
| | VAQFVKDLLFHLRTLFREGQFN (SEQ ID NO: 230) |

### Manufacturing and Purification of Bi-Specific Superkines

[0448] Bi-specific superkines were manufactured in HEK293 cells. MDNA132-Fc-MDNA109 (KIH) was purified by affinity chromatography (Protein A followed by cation exchange), and was analyzed by sodium dodecyl sulfate (SDS)-polyacrylamide gel electrophoresis (PAGE) and high-performance liquid chromatography HPLC (FIG. 4). MDNA413-Fc-MDNA109 (KIH) and MDNA413FEAA-Fc-MDNA109 (2:1:2) were purified by affinity chromatography and size exclusion chromatography (SEC), and were analyzed by SDS-PAGE and HPLC (FIGS. 5 and 6 respectively). Endotoxin levels were measured by the LAL chromogenic endotoxin assay, and are reported in Table 16 with information on purity and buffer.

TABLE 16
Information on available bi-specific superkines.

| Bi-specific | | Purity | |
|---|---|---|---|
| Construct | Buffer | (% monomer) | Endotoxin |
| MDNA132-Fc- | 20 mM Histidine, | >95% | 0.42 EU/mg |
| MDNA109 (KIH) | 5% sorbitol, ph 6 | | |
| MDNA413-Fc- | 20 mM Histidine, | 100% | 0.07 EU/mg |
| MDNA109 (KIH) | 5% sorbitol, ph 6 | | |
| MDNA109FEAA- | 20 mM Histidine, | >89% | 0.134 EU/mg |
| Fc-MDNA413 | 5% sorbitol, ph 6 | | |
| (2:1:2) | | | |

### Signaling in Human PBMC

[0449] In vitro signaling assays based on STAT5 phosphorylation (pSTAT5) provide important functional readouts and were used to evaluate the potency of the MDNA109 superkine at activating different subsets of immune cells expressing different forms of the IL-2 receptor (IL-2R) (Levin et al., 2012). Dose-response experiments were performed in PBMCs derived from healthy human donors to measure the potencies of bi-specific superkines in different subsets of immune cells within the same experimental condition. These studies were used to provide insights into the pharmacological profiles of bi-specific superkines and to determine whether fusions with MDNA413 and MDNA132 affect the activity of MDNA109 and MDNA109FEAA. A major strength with the use of human primary PBMCs is the ability to perform tests on multiple donors to understand the potential effect of genetic heterogeneity on the immune responses triggered by test constructs.

[0450] PBMCs were isolated over a density gradient, allowed to rest in complete media, and then stimulated for 15 minutes with 10-point 5-fold dilutions of IL-2, different MDNA109 variants, or bi-specific superkines. Controls included non-stimulated PBMC cells (i.e. no addition of MDNA109 variants or IL-2). Cells were fixed immediately following stimulation, and samples were analyzed by flow cytometry after intracellular staining for phosphorylated STAT5 (pSTAT5) in the immune subsets as listed in Table 17. The gating strategy employed to enable pSTAT5 analysis in different immune subsets is depicted in FIG. 7 fluorescence minus one (FMO) controls are shown in FIG. 8.

TABLE 17
Flow cytometry markers for different immune subsets

| Cell type | Markers |
|---|---|
| Treg cells | CD3⁺CD4⁺CD25⁺FOXP3⁺ |
| CD8 T cells (naive) | CD3⁺CD8⁺ CD25⁻ |
| CD8 T cells (activated) | CD3⁺CD8⁺ CD25⁺ |
| NK cells | CD3⁻CD56⁺ |

[0451] Representative dose-response curves for each immune subset following stimulation with the indicated test construct are shown in FIG. 9, and a summary of EC50 values from analyses of different PBMC donors are indicated in the chart under the plots. In comparison to IL-2 or IL2-Fc, MDNA109-Fc and MDNA109FEAA-Fc were clearly more potent at activation of naïve (CD25−) CD8 T-cells, as indicated by lower EC50 values. EC50 of MDNA109-Fc (152.2±35.8 pM) and MDNA109FEAA-Fc (370.6±131.1 pM) are 14- and 6-folds lower than IL2-Fc (2189.2±435.3 pM) respectively. With respect to NK cells, MDNA109-Fc and MDNA109FEAA-Fc are both more potent than IL2, but the comparison to IL2-Fc is less clear with MDNA109-Fc and MDNA109FEAA-Fc showing superior or similar potencies respectively.

[0452] Both IL2-Fc and MDNA109-Fc showed similar potency toward the Treg population with EC50 of 0.85±0.4 and 0.9±0.42 μM respectively. In contrast, MDNA109FEAA-Fc demonstrated a dramatic decrease in Treg activation, with an EC50 of 135.5±53.9 pM or an ˜150-fold reduction in comparison to IL2-Fc and MDNA109-Fc.

[0453] The data clearly showed that the bi-specific superkines retain their capacity to effectively stimulate naïve CD8 T-cells compared to IL-2 or IL2-Fc. In comparison to IL2-Fc, MDNA132-Fc-MDNA109 (EC50=258±58.8 pM) is ˜8-fold more potent, MDNA413-Fc-MDNA109 (EC50=378.4±123.1 pM) is ˜6-fold more potent, and MDNA109FEAA-Fc-MDNA413 (EC50=575.8 119 pM) is ˜4-fold more potent. In addition, all three bi-specific superkines are more potent than IL-2 at stimulating NK cells.

[0454] While MDNA109FEAA-Fc-MDNA413 is less potent than the other bi-specific superkines at activation of CD8 T-cells, it remains more effective than IL2-Fc and has the unique property of exhibiting a reduced capacity to stimulate Tregs compared to all other variants. In comparison to IL2-Fc (EC50=0.85±0.4 pM), MDNA109FEAA-Fc-MDNA413 (EC50=210.3±58), which is almost 250-fold weaker at stimulating Tregs.

[0455] A useful metric to predict the potential therapeutic activity of these constructs is the ratio of pSTAT5 EC50 of naïve CD8 T-cells and NK cells to Tregs. As shown in FIG. 10, the CD8 T-cells/Tregs EC50 ratio for IL-2 and IL-2-Fc are higher (694 and 3008 respectively), consistent with the fact that these constructs are better activators of Tregs than they are of naïve CD8 T-cells. This ratio is significantly reduced for MDNA109-Fc as well as MDNA132-Fc-MDNA109 and MDNA413-Fc-MDNA109, consistent with their increased potencies towards naïve CD8 T-cells. The most significant changes are obtained with MDNA109FEAA-Fc and MDNA109FEAA-Fc-MDNA413, for which the CD8 T-cells/Tregs EC50 ratio dropped dramatically to low single digits. Ratios of EC50 of NK cells to Tregs show a similar trend, with MDNA109-Fc, MDNA132-Fc-MDNA109 and MDNA413-Fc-MDNA109 displaying lower ratios than IL-2 and IL2-Fc. MDNA109FEAA-Fc and MDNA109FEAA-Fc-MDNA413 again have the lowest NK cells/Treg EC50 ratios. These results reflect the fact that these constructs not only have increased potencies towards NK and naïve CD8 T-cells, but also have diminished potencies towards Tregs. A combination of increased pro-immune CD8 T-cells and NK cells and reduced immune-suppressive Tregs is anticipated to drive potent anti-cancer immune responses.

### Conclusions:

[0456] Bi-specific superkines harboring an MDNA109 or MDNA109FEAA core component maintain enhanced potency over IL2-Fc at activation of CD8 T-cells. While MDNA132-Fc-MDNA109 (KIH) and MDNA413-Fc-MDNA109 (KIH) have similar potency to IL2-Fc towards Tregs activation, MDNA109FEAA-FC-MDNA413 (2:1:2) display a reduction of almost 250-fold at stimulating the Treg population.

### MTD (Maximum Tolerated Dose) and Dosing Schedule Studies

[0457] MTD is defined as the highest dose of a drug that does not cause significant side effects or overt toxicity. MTD studies were performed in two mouse strains, BALB/c and C57BL/6, which were subsequently used to evaluate anti-cancer efficacy of bi-specific superkines. The use of these two strains enabled efficacy studies using various syngeneic cancer models that are either compatible with BALB/c or C57BL/6 mice. These data were also important for the design of combination studies where the administration of bi-specific superkines were aligned with that of the companion drug for optimal efficacy as well as practicality. The dosing schedule for immune checkpoint inhibitors (ICIs), as an example, in mice and in the clinic is well documented.

[0458] Bi-specific superkines were administered by intraperitoneal (IP) injection, which is also a common route for delivery of ICIs in mice. There were 5 mice in each treatment group depending on the study. In these studies, MTD was strictly defined as any incidence of spontaneous mortality or mandatory termination due to weight loss or moribund during the study period. To date, MTD studies have been conducted for MDNA132-Fc-MDNA109 (KIH) and MDNA413-Fc-MDNA109 (KIH).

### MTD Study in BALB/c Mice:

[0459] A description of the design of the MTD study conducted in BALB/c mice is shown in Table 18. Studies were performed with MDNA132-Fc-MDNA109 and MDNA413-Fc-MDNA109; MDNA109FEAA-Fc-MDNA413 was not available when these experiments were conducted.

TABLE 18
MTD study in BALB/c strain of mice

| Bi-specific Superkine | # of Mice | Dose | Regimen |
|---|---|---|---|
| MDNA132-Fc- | 5 | 1.0 mg/kg | 2x/week for 2 weeks |
| MDNA109 | 5 | 2.5 mg/kg | 2x/week for 2 weeks |
| MDNA413-Fc- | 5 | 1.0 mg/kg | 2x/week for 2 weeks |
| MDNA109 | 5 | 2.5 mg/kg | 2x/week for 2 weeks |

[0460] As shown in FIG. 11, BALB/c mice treated with either 1 mg/kg or 2.5 mg/kg of MDNA132-Fc-MDNA109 or MDNA413-Fc-MDNA109 twice weekly for two weeks were all viable at the end of the study. Mice in both groups appeared clinically normal and maintained their weights during the study period. In summary, MTD was not reached at the highest dose tested (2.5 mg/kg) on a twice weekly dosing schedule for two weeks for both MDNA132-Fc-MDNA109 and MDNA413-Fc-MDNA109 in BALB/c mice.

### MTD Study in C57Bl/6 Mice:

[0461] Table 19 provides an outline of the design of MTD study performed in C57Bl/6 mice. A lower range of dose was used because C57Bl/6 has been found to be more sensitive to IL-2 than BALB/c mice (Chen et al., 2005).

TABLE 19
MTD Study in C57Bl/6 strain of mice

| Bi-specific Superkine | # of Mice | Dose | Regimen |
|---|---|---|---|
| MDNA132-Fc- | 5 | 0.2 mg/kg | 2x/week for 2 weeks |
| MDNA109 | 5 | 0.5 mg/kg | 2x/week for 2 weeks |
| | 5 | 1.0 mg/kg | 2x/week for 2 weeks |
| MDNA413-Fc- | 5 | 0.2 mg/kg | 2x/week for 2 weeks |
| MDNA109 | 5 | 0.5 mg/kg | 2x/week for 2 weeks |
| | 5 | 1.0 mg/kg | 2x/week for 2 weeks |

[0462] As shown in FIG. 12, C57Bl/6 mice treated with MDNA132-Fc-MDNA109 or MDNA413-Fc-MDNA109 twice weekly for two weeks at 0.2 mg/kg, 0.5 mg/kg and 1.0 mg/kg were all viable at the end of the study. Mice in both groups appeared clinically normal and maintained their weights during the study period. In summary, MTD was not reached at the highest dose tested (1.0 mg/kg) on a twice weekly dosing schedule for two weeks for both MDNA132-Fc-MDNA109 and MDNA413-Fc-MDNA109 in C57Bl/6 mice.

[0463] FIG. 12: Survival C57Bl/6 mice receiving different doses of MDNA132-Fc-MDNA109 (left) and MDNA413-Fc-MDNA109 (right).

### Conclusions:

[0464] MDNA132-Fc-MDNA109 and MDNA413-Fc-MDNA109 were well tolerated by BALB/c mice when administered twice weekly for two weeks at 1.0 mg/kg and 2.5 mg/kg, indicating that MTD was not reached at the highest dose (2.5 mg/kg) tested.

[0465] MDNA132-Fc-MDNA109 and MDNA413-Fc-MDNA109 were well tolerated by C57B/6 mice when administered twice weekly for two weeks at 0.2 mg/kg, 0.5 mg/kg and 1.0 mg/kg, indicating that MTD was not reached at the highest dose (1.0 mg/kg) tested.

### In Vivo Efficacy Studies

[0466] Translatability of strong in vitro functional data to clinically relevant anti-cancer phenotypes was tested using in vivo tumor models. These in vivo efficacy studies were performed using bi-specific superkines as single agents or in combination with ICI. Since MTD was not reached, higher doses than those tested were used, albeit at a less frequent dosing schedule. In addition, preliminary experiments were also performed in which bi-specific superkines were delivered directly into the tumors to assess the effects of localized administration on efficacy.

### Efficacy Studies in CT26 Colon Cancer Model:

[0467] The CT26 syngeneic colon cancer model was selected to evaluate the therapeutic potential of bi-specific superkines for a number of reasons:
[0468] The CT26 cancer model is less aggressive compared to many other cancer models (e.g. B16F10 melanoma model, 4T1 metastatic breast cancer model or the Panc2 pancreatic cancer model), therefore providing a larger window to follow the therapeutic effects of MDNA109 variants.
[0469] CT26 cancer model is responsive to ICIs in contrast to several other models, therefore providing an opportunity to evaluate combinatory treatments to determine potential synergy.
[0470] The relatively slow growth characteristic of CT26 tumors provides an opportunity to evaluate the anti-tumor activity of MDNA109 variants in the context of early stage (i.e. small) versus late stage (i.e. large) tumors.

[0471] The efficacy study that has been conducted in the CT26 model with MDNA132-Fc-MDNA109 (KIH) has the following study design:
[0472] Female (8-10 weeks old) BALB/c mice were implanted with 2×10⁶ CT26 cells subcutaneously in the right flank, and tumors were allowed to grow until average tumor size reached 60 mm3.
[0473] Mice were randomized into groups of either 6 (vehicle control) or 8 (MDNA132-Fc-MDNA109) mice each based on tumor size.
[0474] Mice were dosed by IP with either vehicle (PBS) or MDNA132-Fc-MDNA109 at 5 mg/kg once weekly for 2 weeks
[0475] Study measurements to include:
   [0476] Daily clinical cage-side observations.
   [0477] Twice weekly body weights and tumor measurements.
   [0478] Monitor food and water consumption.
[0479] Animals to be prematurely terminated if any of the following criteria are met:
   [0480] Weight loss exceeding 20% of the maximum weight for that animal.
   [0481] Tumor volume exceeding 2000 mm³.
   [0482] Animal appearing moribund.

[0483] As shown in FIG. 13 (a), treatment with MDNA132-Fc-MDNA109 (KIH) resulted in potent inhibition of CT26 tumors growth. In fact, 3 of 8 mice treated with MDNA132-Fc-MDNA109 (KIH) resulted in complete tumor regression whereas this was not observed with control mice (FIG. 13 (b)). These three mice have not shown any sign of tumor relapse for more than 120 days post-implant or more than 3 months since treatment was stopped, indicating that they have been cured of cancer.

[0484] To validate whether mice that were cured of their primary CT26 tumors following 2 doses of MDNA132-Fc-MDNA109 are protected against subsequent re-challenges, the three mice were implanted with CT26 on their opposite flank on Day 49 of the study and were not given any further treatment. As controls, naïve untreated mice were also implanted with CT26 tumor cells. As shown in FIG. 14(a), naïve BALB/c mice showed robust CT26 tumor growth. In contrast, the mice treated with MDNA132-Fc-MDNA109 and cured of their primary tumors did not show any sign of tumor growth at the re-challenge site, suggesting that they have developed a strong memory response against CT26 tumor cells. These mice have undergone a second re-challenge and are continued to be monitored. MDNA132-Fc-MDNA109 therefore provides these mice with overall survival benefits in spite of multiple re-challenges (FIG. 14(b)).

### Efficacy Studies in B16F10 Melanoma Model:

[0485] The B16F10 syngeneic melanoma model in C57Bl/6 mice is an aggressive in vivo tumor model that has withstood many therapeutic efforts due in part to the speed at which these tumors grow and metastasize in mice. In comparison to the CT26 tumor model, this is a significantly more difficult model to treat and therefore provides an important challenge to evaluate the potential therapeutic activity of bi-specific superkines. Two efficacy studies were separately conducted to evaluate the efficacy of MDNA413-Fc-MDNA109 (KIH) and MDNA109FEAA-Fc-MDNA109. Both studies followed a similar protocol as outlined below:
[0486] Female (8-10 weeks old) C57Bl/6 mice were implanted with 3×105 C57Bl/6 cells subcutaneously in the right flank, and tumors were allowed until tumor growth has been established before initiation of dosing.
[0487] Mice were randomized into treatment groups based on tumor size such that average tumor size of each group are similar.
[0488] Mice were dosed by IP at dose and schedule specific to each study (see below)
[0489] Study measurements to include:
   [0490] Daily clinical cage-side observations
   [0491] Twice weekly body weights and tumor measurements
   [0492] Monitor food and water consumption.
[0493] Animals to be prematurely terminated if any of the following criteria are met:
   [0494] Weight loss exceeding 20% of the maximum weight for that animal
   [0495] Tumor volume exceeding 2000 mm3
   [0496] Animal appearing moribund
      B16F10 Efficacy Study with MDNA413-Fc-MDNA109 (KIH):

[0497] Average tumor size was ˜20 mm3 at the initiation of dosing. Mice were IP injected with PBS (n=9) or MDNA413-Fc-MDNA109 at 1 mg/kg (n=7) or 2.5 mg/kg (n=9) twice weekly for 2 weeks. As shown in FIG. 15, treatment with MDNA413-Fc-MDNA109 resulted in inhibition of B16F10 tumor growth in a dose-dependent manner. MDNA413-Fc-MDNA109 given at 2.5 mg/kg was more potent at growth inhibition than the 1 mg/kg dose.

B16F10 Efficacy with MDNA109FEAA-Fc-MDNA413.

[0498] In this study, tumors were grown to an average size of ˜15 mm3 at the start of dosing. Mice were dose with PBS (n=8) or MDNA109FEAA-Fc-MDNA413 (n=8) once weekly for 3 weeks at 5 mg/kg. As shown in FIG. 16A-16B, MDNA109FEAA-Fc-MDNA413 had no effect on the growth of B16F10 melanomas with tumors growing similarly as with the control mice. These data suggest that a more frequent dosing schedule (twice weekly) may be necessary to achieve a therapeutic response with MDNA109FEAA-Fc-MDNA413.

### Efficacy Studies in the 4T1 Breast Cancer Model:

[0499] The 4T1 breast cancer model is also an aggressive model with a high incidence of tumor metastasis. This model has been used to test the therapeutic activity of drugs aim at modulating myeloid-derived suppressor cells (MDSC) and M1 to M2 skewing of tumor associated fibroblasts, both of which work to support tumor growth.

[0500] To date, one 4T1 efficacy study has been conducted to evaluate the therapeutic potential of MDNA132-Fc-MDNA109 (KIH) and MDNA413-Fc-MDNA109 (KIH) as monotherapies (i.e. with isotype control; BioXcel BE0089) or in combination with anti-PD1 (Clone RMP1-4; BioXcell BE0146). The study design was as follow:
[0501] 8-weeks old female BALB/c mice were implanted with 2×106 4T1 cells subcutaneously, and tumors were allowed to grow for 14 days prior to initiation of dosing.
[0502] Animals were randomized into groups of 8 mice each based on tumor size.
[0503] Treatment were as outlined in Table 20.
[0504] Study measurements to include:
   [0505] Daily clinical cage-side observations
   [0506] Twice weekly body weights and tumor measurements
   [0507] Monitor food and water consumption.
[0508] Animals to be prematurely terminated if any of the following criteria are met:
   [0509] Weight loss exceeding 20% of the maximum weight for that animal
   [0510] Tumor volume exceeding 2000 mm3
   [0511] Animal appearing moribund

TABLE 20
Design of 4T1 efficacy study.

| | # of | | | | | | Dosing |
|---|---|---|---|---|---|---|---|
| Group | mice | Compound | Dose | | Route | Frequency | Days |
| 1 | 8 | Vehicle | N/A | | IP | Twice | 4 |
| | | | | | | weekly for | |
| | | | | | | 2 weeks | |
| | | Isotype | 200 | μg | IP | Twice | 4 |
| | | | | | | weekly for | |
| | | | | | | 2 weeks | |
| 2 | 8 | PD1 Mab | 200 | μg | IP | Twice | 4 |
| | | | | | | weekly for | |
| | | | | | | 2 weeks | |
| 3 | 8 | MDNA132-Fc- | 5 | mg/kg | IP | Once | 2 |
| | | MDNA109 | | | | weekly for | |
| | | (KIH) C | | | | 2 weeks | |
| | | Isotype | 200 | μg | IP | Twice | 4 |
| | | | | | | weekly for | |
| | | | | | | 2 weeks | |
| 4 | 8 | MDNA132-Fc- | 5 | mg/kg | IP | Once | 2 |
| | | MDNA109 | | | | weekly for | |
| | | (KIH) C | | | | 2 weeks | |
| | | PD1 Mab | 200 | μg | IP | Twice | 4 |
| | | | | | | weekly for | |
| | | | | | | 2 weeks | |
| 5 | 8 | MDNA413-Fc- | 5 | mg/kg | IP | Once | 2 |
| | | MDNA109 | | | | weekly for | |
| | | (KIH) | | | | 2 weeks | |
| | | Isotype | 200 | μg | IP | Twice | 4 |
| | | | | | | weekly for | |
| | | | | | | 2 weeks | |
| 6 | 8 | MDNA413-Fc- | 5 | mg/kg | IP | Once | 2 |
| | | MDNA109 | | | | weekly for | |
| | | (KIH) | | | | 2 weeks | |
| | | PD1 Mab | 200 | μg | IP | Twice | 4 |

weekly for
2 weeks

[0512] As shown in FIG. 17, mice in the MDNA132-Fc-MDNA109 and MDNA413-Fc-MDNA109 monotherapy and combination groups were found dead following the second dose, indicating adverse toxicity at the 5 mg/kg once weekly doing regimen in this model. In a previous study in the CT26 model (see above), also in BALB/c mice, treatment with MDNA132-Fc-MDNA109 on the same regimen did not result in toxicity, suggesting that this may be related to the 4T1 tumor model itself.

Preliminary Efficacy Studies with Intra-Tumoral Delivery of Bi-specific Superkines:

[0513] Preliminary studies were conducted in a limited number of mice with established CT26 or 1B6F10 tumors to determine whether intratumoral delivery of bi-specific superkies into the tumors could have a strong therapeutic effect.

B16F10 Intra-Tumoral Treatment with MDNA132-Fc-MDNA109:

[0514] Established B16F10 tumors were intratumorally injected with PBS (n=2) or with 10 μg of MDNA132-Fc-MDNA109 (KIH) for 3 doses 3 days apart (n=2). While sample size was very small, the data suggested that intra-tumoral injection with MDNA132-Fc-MDNA109 delayed the growth of B16F10 melanomas (FIG. 18).

CT26 Intra-Tumoral Treatment with MDNA109FEAA-Fc-MDNA413:

[0515] Mice with established CT26 tumors (n=5) were injected intra-tumorally with MDNA109FEAA-Fc-MDNA413 at 10 μg per dose for 3 days apart for a total of 3 doses. As shown in FIG. 19, tumors injected with MDNA109FEAA-Fc-MDNA413 continued to grow steadily during the study. However, it is not clear whether treatment did have an effect on the rate of growth because PBS controls were not available.

### SUMMARY

[0516] This report provides a summary of information available to date on bi-specific superkines (i.e. MDNA132-Fc-MDNA109 (KIH), MDNA413-Fc-MDNA109 (KIH), and MDNA109FEAA-Fc-MDNA109 (2:1:2)), including their manufacturing and in vitro and in vivo studies that have been performed to evaluate their biological activities.

[0517] Studies in human PBMC showed that MDNA132-Fc-MDNA109, MDNA413-Fc-MDNA109 and MDNA109FEAA-Fc-MDNA413 are more potent than IL-2 and IL2-Fc at activation of naïve CD8 T-cells, indicating that the activity of the core MDNA109 or MDNA109FEAA component of these bi-specific superkines are preserved. Whereas MDNA132-Fc-MDNA109 and MDNA413-Fc-MDNA109 displayed similar activity on the Treg population as IL-2 and IL2-Fc, MDNA109FEAA-Fc-MDNA413 showed a dramatic reduction in ability to stimulate these immune-suppressive cells, as anticipated due to the FEAA mutations. These data indicate that these bi-specific superkines, and particularly MDNA109FEAA-Fc-MDNA143, have a more favorable anti-cancer immunological profile than IL-2 and IL2-Fc.

[0518] MTD studies in BALB/c and C57Bl/6 mice showed that MDNA132-Fc-MDNA109 and MDNA413-Fc-MDNA109 were well tolerated at the highest dose tested (2.5 mg/kg in BALB/c and 1.0 mg/kg in C57Bl/6) when administered on a twice weekly schedule for 2 weeks. In both cases, MTD were not reached indicating that these bi-specific superkines can be safely administered at even higher doses.

[0519] MDNA132-Fc-MDNA109 (KIH) was tested in a CT26 colon tumor model, in which the treatment schedule was reduced to once weekly for 2 weeks, while the dose was increased to 5 mg/kg. This doing regimen was well tolerated. Data showed that MDNA132-Fc-MDNA109 (KIH) monotherapy potently inhibited the growth and CT26 tumors, and in fact induced complete and durable tumor regression in 3 of 8 mice. These mice are still viable and remaining tumor free for more than 3 months since treatment was stopped. Importantly, these mice have undergone a re-challenge with CT26 tumor cells and were found to be resistance against tumor growth, suggesting that they have developed a strong memory response against CT26. An additional re-challenge has been initiated with these mice.

[0520] MDNA413-Fc-MDNA109 (KIH) inhibited the growth the B16F10 melanomas when administered twice weekly for two weeks. The inhibitory effect was dose-dependent with mice receiving a dose of 2.5 mg/kg displaying slower tumor growth than mice receiving a dose of 1 mg/kg.

[0521] MDNA109FEAA-Fc-MDNA109 had little to no effect on the growth of B16F10 melanomas when administered at 5 mg/kg once weekly for 3 weeks. It is possible that a higher dose or more frequent dosing schedule is needed to achieve a therapeutic effect.

[0522] While MDNA132-Fc-MDNA109 was well tolerated in the CT26 tumor model in BALB/c mice (see above), it was not well tolerated well in the 4T1 model, also in BALB/c mice, under the exact dosing regimen of 5 mg/kg once weekly for two weeks. Mice died soon after receiving the second dose of MDNA132-Fc-MDNA109 irrespective of whether treatment was monotherapy or in combination with anti-PD1. Similarly, 4T1 tumor bearing mice treated once weekly with MDNA413-Fc-MDNA109 at 5 mg/kg also died soon after receiving the second dose. These data suggest the lethality associated with these bi-specific superkines may be related to the 4T1 model itself rather than the strain of mice used in the experiment.

[0523] Preliminary studies with intra-tumoral administration of bi-specific superkines were not conclusive due to a lack of controls and/or small sample size. CT26 tumors injected with MDNA109FEAA-Fc-MDNA413 continued to grow steadily during the study, however it was not clear whether there was an effect on growth rate since control tumors injected with vehicle were not available for comparison. MDNA132-Fc-MDNA109 did appear to delay the growth of B16F10 tumors when injected intra-tumorally compared to PBS injected control tumors, but the sample size was too small (n=2 per group) for meaningful comparison.

### Antagonistic Effect of MDNA413-Fc-MDNA109 (KIH) and MDNA109-Fc-MDNA413

[0524] The capacity of MDNA413-Fc-MDNA109 (KIH) and MDNA109-Fc-MDNA413 to inhibit IL-4 and IL-13 induced STAT6 activation was assayed. by using HEK-Blue™ IL-4/IL-13 cells. These cells were generated by stably introducing the human STAT6 gene into HEK293 cells to obtain a fully active STAT6 signaling pathway. The other genes of the pathway are naturally expressed in sufficient amounts. Furthermore, HEK-Blue™ IL-4/IL-13 Cells stably express the reporter gene secreted embryonic alkaline phosphatase (SEAP) under the control of the IFNb minimal promoter fused to four STAT6 binding sites. Activation of the STAT6 pathway in HEK-Blue™ IL-4/IL-13 Cells by IL-4 or IL-13 induced the expression of the reporter gene. SEAP which was secreted in the supernatant was detected when using QUANTI-Blue™ a medium that turns purple/blue in the presence of SEAP.

[0525] The HEK Blue™ IL-4/IL-13 cells were treated with human IL-4 (hIL4), human IL-13 (hIL13) or mouse IL-13 (mIL13) with or without an indicated fusion protein for 24 hours. 20 μl of the cell culture supernatant was then taken and mixed with 180 μl of QUANTI-Blue™ solution and incubated for 2 hours at 37° C. Absorbance was measured at 650 nm.

[0526] As shown in FIG. 20, human IL-4 (hIL4), human IL-13 (hIL13) and mouse IL-13 (mIL13) activated STAT6 signaling pathway in a dose dependent manner. The EC50 was shown in the figure for each interleukin protein.

[0527] After HEK Blue™ IL-4/IL-13 cells were treated with human IL-13 (hIL13) together with MDNA413-Fc-MDNA109 (KIH), MDNA109-Fc-MDNA413, Fc-MDNA413, or Fc-MDNA109, the activation of STAT signaling pathway by hIL13 was antagonized by MDNA413-Fc-MDNA109 (KIH), MDNA109-Fc-MDNA413, and Fc-MDNA413 (FIG. 21). Among the above three fusion proteins, MDNA109-Fc-MDNA413 more effectively inhibits hIL-13 induced STAT6 activation.

[0528] After HEK Blue™ IL-4/IL-13 cells were treated with human IL-13 (hIL13) together with MDNA413-Fc-MDNA109 (KIH), MDNA109-Fc-MDNA413, Fc-MDNA413, or Fc-MDNA109, the activation of STAT signaling pathway by hIL13 was antagonized by MDNA413-Fc-MDNA109 (KIH), MDNA109-Fc-MDNA413, and Fc-MDNA413 (FIG. 21). Among the above three fusion proteins, MDNA109-Fc-MDNA413 and Fc-MDNA413 mostly effectively inhibit hIL13 induced STAT6 activation. MDNA413-Fc-MDNA109 (KIH) inhibits hIL13 induced STAT6 activation, but to a lesser degree than MDNA109-Fc-MDNA413 and Fc-MDNA413.

[0529] After HEK Blue™ mIL-4/IL-13 cells were treated with mouse IL-13 (mIL13) together with MDNA413-Fc-MDNA109 (KIH), MDNA109-Fc-MDNA413, Fc-MDNA413, or Fc-MDNA109, the activation of STAT signaling pathway by mIL13 was antagonized by MDNA413-Fc-MDNA109 (KIH), MDNA109-Fc-MDNA413, and Fc-MDNA413 (FIG. 22). Among the above three fusion proteins, MDNA109-Fc-MDNA413 and Fc-MDNA413 mostly effectively inhibit mIL13 induced STAT6 activation. MDNA413-Fc-MDNA109 (KIH) inhibits mIL13 induced STAT6 activation, but to a lesser degree than MDNA109-Fc-MDNA413 and Fc-MDNA413.

[0530] After HEK Blue™ mIL-4/IL-13 cells were treated with human IL-4 (hIL4) together with MDNA413-Fc-MDNA109 (KIH), MDNA109-Fc-MDNA413, Fc-MDNA413, or Fc-MDNA109, the activation of STAT signaling pathway by hIL4 was antagonized by MDNA413-Fc-MDNA109 (KIH), MDNA109-Fc-MDNA413, and Fc-MDNA413 (FIG. 23). Among the above three fusion proteins, MDNA109-Fc-MDNA413 and Fc-MDNA413 mostly effectively inhibit hIL4 induced STAT6 activation. MDNA413-Fc-MDNA109 (KIH) inhibits hIL4 induced STAT6 activation, but to a lesser degree than MDNA109-Fc-MDNA413 and Fc-MDNA413.

### MDNA413-Fc-MDNA109 (KIH), MDNA109FEAA-Fc-MDNA413 and MDNA132-Fc-MDNA109 (KIH) Maintain IL-2 Mutein Activity

[0531] The IL-2 activity was assessed in the bispecific fusion proteins comprising an IL-2 mutein. The murine T cell line CTLL2 was used. This line is IL-2 dependent and constitutively expresses the αβγ form of IL-2R. The cells were cultured in RPMI 1640 supplemented with 10% heat-inactivated FBS, 2 mM L-glutamine, 50 U/ml penicillin, and 50 mg/ml streptomycin. Recombinant human IL-2 (rhIl2) or various fusion proteins were supplemented to the cell culture and the proliferation of the cells were assayed.

[0532] As shown in FIG. 24A, cell proliferation was dependent on IL-2. Cell proliferation was nonexistent when the cell culture was supplemented with Fc-MDNA413 instead of IL-2 (FIG. 24B). Cell proliferation was maintained or increased when the cell culture was supplemented with a bispecific fusion protein comprising an IL-2 mutein (MDNA413-Fc-MDNA109 (KIH), MDNA109FEAA-Fc-MDNA413 or MDNA132-Fc-MDNA109 (KIH), FIG. 24C). Therefore, MDNA413-Fc-MDNA109 (KIH), MDNA109FEAA-Fc-MDNA413 and MDNA132-Fc-MDNA109 (KIH) maintained IL-2 mutein activity.

### P-STAT5 Assay in Human PBMC:

[0533] Briefly, the experimental design (carried out at CRL, Portishead, UK) was as follows: PBMCs were isolated over a density gradient, allowed to rest in complete media, and then stimulated for 15 minutes with 10-point 5-fold dilutions (from 25,000 pM to 0.013 pM) of each test construct to generate dose-response curves in order to determine EC50. Cells were fixed immediately following stimulation, and samples analyzed by flow cytometry after intracellular staining for phosphorylated STAT5 (pSTAT5) in the immune cell subsets listed in Table 21. The gating strategy employed to enable pSTAT5 analysis in these subsets is depicted in FIG. 7 and representative fluorescence minus one (FMO) controls are shown in FIG. 8.

TABLE 21
Flow cytometry markers for different immune cell subsets

| Cell type | Markers |
|---|---|
| Treg cells | CD3⁺CD4⁺CD25⁺FOXP3⁺ |
| CD8 T-cells (naive) | CD3⁺CD8⁺ CD25⁻ |
| CD8 T-cells (activated) | CD3⁺CD8⁺ CD25⁺ |
| NK cells | CD3⁻CD56⁺ |

[0534] As provided in FIG. 7, gating strategy. PBMCs were stimulated with IL-2 (25 nM) for 15 minutes prior to staining and analysis by flow-cytometry. Single lymphocytes were identified from which NK cells (CD3−CD56+), CD8+ T-cells (CD3+CD8+), Tregs (CD3+CD4+CD25+FOXP3+) and non-Treg CD4+ T-cells (CD3+CD25−CD4+FOXP3−) were gated. Frequency of pSTAT5 positive cells was determined for each immune cell subset.

[0535] As provided in FIG. 8, fluorescence minus one (FMO) controls. A) Following stimulation and gating strategy described in FIG. 4, all antibodies used to identify the different immune subsets were included except for pSTAT5 to provide an FMO control that could be used to create a pSTAT5+ gate for each population. B) FMOs for FOXP3 and CD25 were used to determine Treg population.

### MTD (Maximum Tolerated Dose):

[0536] As provided in FIGS. 11 and 12, female BALB/c (Table 22) or C57BL/6 (Table 23) mice of 6-8 weeks of age were acclimatized for at least 7 days prior to start of experiment. Mice were administered with constructs by intraperitoneal (IP) inject following the dose and schedule indicated below. During the 2-week study, mice were monitored daily by cage-side observation and body weight measurements twice weekly. In these studies, MTD was strictly defined as any incidence of spontaneous mortality or mandatory termination due to weight loss (>20% of the pre-dose weight) or moribund during the study period. At end of the study, mice were euthanized and necropsy was performed.

### Studies in BALB/c Mice:

[0537] BALB/c mice treated with either 1 mg/kg or 2.5 mg/kg of MDNA132-Fc-MDNA109 or MDNA413-Fc-MDNA109 twice weekly for two weeks were all viable at the end of the study. Mice in both groups appeared clinically normal and maintained their weights during the study period. In summary, MTD was not reached at the highest dose tested (2.5 mg/kg) on a twice weekly dosing schedule for two weeks for both MDNA132-Fc-MDNA109 and MDNA413-Fc-MDNA109 in BALB/c mice.

TABLE 22
MTD study in BALB/c strain of mice.

| Bi-specific Superkine | # of Mice | Dose | Regimen |
|---|---|---|---|
| MDNA132-Fc- | 5 | 1.0 mg/kg | 2×/week for 2 weeks |
| MDNA109 | 5 | 2.5 mg/kg | 2×/week for 2 weeks |
| MDNA413-Fc- | 5 | 1.0 mg/kg | 2×/week for 2 weeks |
| MDNA109 | | | |

### Studies in C57BL/6 Mice:

[0538] A lower range of dose was used because C57Bl/6 has been found to be more sensitive to IL-2 than BALB/c mice (Chen et al., 2005). C57Bl/6 mice treated with MDNA132-Fc-MDNA109 or MDNA413-Fc-MDNA109 twice weekly for two weeks at 0.2 mg/kg, 0.5 mg/kg and 1.0 mg/kg were all viable at the end of the study. Mice in both groups appeared clinically normal and maintained their weights during the study period. In summary, MTD was not reached at the highest dose tested (1.0 mg/kg) on a twice weekly dosing schedule for two weeks for both MDNA132-Fc-MDNA109 and MDNA413-Fc-MDNA109 in C57Bl/6 mice.

TABLE 23
MTD Study in C57Bl/6 strain of mice.

| Bi-specific Superkine | # of Mice | Dose | Regimen |
|---|---|---|---|
| MDNA132-Fc- | 5 | 0.2 mg/kg | 2×/week for 2 weeks |
| MDNA109 | 5 | 0.5 mg/kg | 2×/week for 2 weeks |
| | 5 | 1.0 mg/kg | 2×/week for 2 weeks |
| MDNA413-Fc- | 5 | 0.2 mg/kg | 2×/week for 2 weeks |
| MDNA109 | 5 | 0.5 mg/kg | 2×/week for 2 weeks |
| | 5 | 1.0 mg/kg | 2×/week for 2 weeks |

[0539] Note: Chen X, Oppenheim J J, Howard O M. BALB/c mice have more CD4+CD25+ T regulatory cells and show greater susceptibility to suppression of their CD4+CD25− responder T cells than C57BL/6 mice. J Leukoc Biol. (2005) 78(1):114-21.

### CT26 Efficacy Study:

[0540] The CT26 syngeneic colon cancer model was selected to evaluate the therapeutic potential of bi-specific superkines for a number of reasons:

[0541] The CT26 cancer model is less aggressive compared to many other cancer models (e.g. B16F10 melanoma model, 4T1 metastatic breast cancer model or the Panc2 pancreatic cancer model), therefore providing a larger window to follow the therapeutic effects of MDNA109 variants.

[0542] CT26 cancer model is responsive to ICIs in contrast to several other models, therefore providing an opportunity to evaluate combinatory treatments to determine potential synergy.

[0543] The relatively slow growth characteristic of CT26 tumors provides an opportunity to evaluate the anti-tumor activity of MDNA109 variants in the context of early stage (i.e. small) versus late stage (i.e. large) tumors.

[0544] To date, one efficacy study has been conducted in the CT26 model with MDNA132-Fc-MDNA109 (KIH). Study design is as follow:

[0545] Female (8-10 weeks old) BALB/c mice were implanted with 2×106 CT26 cells subcutaneously in the right flank, and tumors were allowed to grow until average tumor size reached 60 mm3.

[0546] Mice were randomized into groups of either 6 (vehicle control) or 8 (MDNA132-Fc-MDNA109) mice each based on tumor size.

[0547] Mice were dosed by IP with either vehicle (PBS) or MDNA132-Fc-MDNA109 at 5 mg/kg once weekly for 2 weeks. This was based on dose and schedule of other MDNA109 constructs under investigation at that time.

[0548] Study measurements to include:
[0549] Daily clinical cage-side observations
[0550] Twice weekly body weights and tumor measurements
[0551] Monitor food and water consumption.

[0552] Animals to be prematurely terminated if any of the following criteria are met:
[0553] Weight loss exceeding 20% of the maximum weight for that animal
[0554] Tumor volume exceeding 2000 mm3
[0555] Animal appearing moribund

[0556] As provided in FIG. 13, treatment with MDNA132-Fc-MDNA109 (KIH) resulted in potent inhibition of CT26 tumors growth. In fact, 3 of 8 mice treated with MDNA132-Fc-MDNA109 (KIH) resulted in complete tumor regression whereas this was not observed with control mice. These three mice have not shown any sign of tumor relapse for more than 120 days post-implant or more than 3 months since treatment was stopped, indicating that they have been cured of cancer.

[0557] As provided in FIG. 14, to validate whether mice that were cured of their primary CT26 tumors following 2 doses of MDNA132-Fc-MDNA109 are protected against subsequent re-challenges, the three mice were implanted with CT26 on their opposite flank on Day 49 of the study and were not given any further treatment. As controls, naïve untreated mice were also implanted with CT26 tumor cells. Naïve BALB/c mice showed robust CT26 tumor growth. In contrast, the mice treated with MDNA132-Fc-MDNA109 and cured of their primary tumors did not show any sign of tumor growth at the re-challenge site, suggesting that they have developed a strong memory response against CT26 tumor cells. These mice have undergone a second re-challenge and are continued to be monitored. MDNA132-Fc-MDNA109 therefore provides these mice with overall survival benefits in spite of multiple re-challenges.

### B16F10 Efficacy Study

[0558] The B16F10 syngeneic melanoma model in C57Bl/6 mice is an aggressive in vivo tumor model that has withstood many therapeutic efforts due in part to the speed at which these tumors grow and metastasize in mice. In comparison to the CT26 tumor model, this is a significantly more difficult model to treat and therefore provides an important challenge to evaluate the potential therapeutic activity of bi-specific superkines. To date, two efficacy studies have been separately conducted to evaluate the efficacy of MDNA413-Fc-MDNA109 (KIH) and MDNA109FEAA-Fc-MDNA109. Both studies followed a similar protocol as outlined below:

[0559] Female (8-10 weeks old) C57Bl/6 mice were implanted with 3×105 C57Bl/6 cells subcutaneously in the right flank, and tumors were allowed until tumor growth has been established before initiation of dosing.

[0560] Mice were randomized into treatment groups based on tumor size such that average tumor size of each group are similar.

[0561] Mice were dosed by IP at dose and schedule specific to each study (see below)

[0562] Study measurements to include:
[0563] Daily clinical cage-side observations
[0564] Twice weekly body weights and tumor measurements
[0565] Monitor food and water consumption.

[0566] Animals to be prematurely terminated if any of the following criteria are met:
[0567] Weight loss exceeding 20% of the maximum weight for that animal
[0568] Tumor volume exceeding 2000 mm3
[0569] Animal appearing moribund
   B16F10 Efficacy Study with MDNA413-Fc-MDNA109 (KIH):

[0570] As provided in FIG. 15, average tumor size was ˜20 mm3 at the initiation of dosing. Mice were IP injected with PBS (n=9) or MDNA413-Fc-MDNA109 at 1 mg/kg (n=7) or 2.5 mg/kg (n=9) twice weekly for 2 weeks. Treatment with MDNA413-Fc-MDNA109 resulted in inhibition of B16F10 tumor growth in a dose-dependent manner. MDNA413-Fc-MDNA109 given at 2.5 mg/kg was more potent at growth inhibition than the 1 mg/kg dose.

B16F10 Efficacy with MDNA109FEAA-Fc-MDNA413.

[0571] As provided in FIG. 16, tumors were grown to an average size of ˜15 mm3 at the start of dosing. Mice were dose with PBS (n=8) or MDNA109FEAA-Fc-MDNA413 (n=8) once weekly for 3 weeks at 5 mg/kg. As shown in FIG. 13, MDNA109FEAA-Fc-MDNA413 had no effect on the growth of B16F10 melanomas with tumors growing similarly as with the control mice. These data suggest that a more frequent dosing schedule (twice weekly) may be necessary to achieve a therapeutic response with MDNA109FEAA-Fc-MDNA413.

### HEK Blue IL-4/IL-13 Assay:

[0572] HEK-Blue IL-4/IL-13 reporter cells were purchased from InvivoGen (Catalog bkb0il413). The kit contained all necessary contents for execution. Detailed description of methodology is provided by the InvivoGen. This cell line provides readout of activation of IL-4/IL-13 signaling in response to these cytokines.

### Dose-Response to Human (h) IL13, Mouse (m) IL13 and Human (h) IL4

[0573] As provided in FIG. 20, cells were plated at 50,000 cells per well in the test medium per the manufacturer's instructions and treated with serially diluted hIL13, mIL13, and hIL4 for 24 hours. After incubation, the cell supernatant (20 μL) was removed to a new plate and then 180 of QUANTI-Blue solution was added and incubated for 2 hours at 37 C. Plates were scanned on a conventional plate reader for absorbance at 650 nm.

Blocking Assay with Bi-Specific Constructs

[0574] Variants tested are presented in Table 24. Cells were plated at 50,000 cells per well in the test medium per the manufacturer's instructions and treated with increasing concentrations of hIL13, mIL13 and hIL4 for 24 hours. In addition, wells containing hIL13 (at 10 and 30 ng/mL), mIL13 (at 10 ng/mL) and hIL4 (at 0.1 ng/mL) were treated with increasing concentrations of the test constructs listed in Table 25. Two concentrations were selected for hIL13 to examine the difference between running the assay at saturating or just sub-saturating levels of hIL13. After incubation, the cell supernatant (20 μL) was removed to a new plate and then 180 of QUANTI-Blue solution was added and incubated for 2 hours at 37 C. Plates were scanned on a conventional plate reader for absorbance at 650 nm.

TABLE 24
Test Constructs

| | Construct | Source | Note |
|---|---|---|---|
| 1 | MDNA413-Fc-MDNA109 | At MDS | MDNA413 = IL4/IL13 antagonist |
| | (KIH) (1:1:1) T1912B03 | | MDNA109 = IL2 |
| | | | superkine/agonist |
| 2 | MDNA109FEAA-Fc- | At MDS | MDNA413 = IL4/IL13 antagonist |
| | MDNA413 | | MDNA109FEAA = IL2 |
| | (2:1:2) T1924B08 | | superkine/agonist |
| 3 | Fc4-413 T1918B04 | At MDS | MDNA413 = IL4/IL13 antagonist |
| 4 | Fc-MDNA109 T1912B04 | At MDS | MDNA109 = IL2 |
| | | | superkine/agonist |

[0575] As provided in FIG. 21, For hIL13 the addition of up to 10,000 ng/mL of the various test proteins had a clear inhibitory effect on the hIL13 response with Fc4-MDNA413 and MDNA109FEAA-Fc-413 when hIL13 was tested at 10 ng/mL (˜EC80). MDNA413-Fc-MDNA109 KIH had a weak effect, and no obvious effect was observed with Fc-MDNA109. When hIL13 was included at 30 ng/mL (EC100), the responses were similar although the overall level of inhibition observed was much lower due to the higher level hIL13 included in the reactions.

[0576] As described in FIGS. 22 (mIL13) and 23 (hIL4): for mIL13 (tested at 10 ng/mL or EC60 for the standard curve in this experiment) and hIL4, (tested at 0.1 ng/mL or EC55 for this standard curve) the trends were also similar. Clear inhibition of the mIL13 activation response (see, FIGS. 22 and 23) and the hIL4 activation was observed with Fc4-MDNA413 and MDNA109FEAA-Fc-413 while MDNA413-Fc-MDNA109 KIH had a weaker overall effect. Again, little inhibition was observed with Fc-MDNA109 alone.

### CTLL-2 Proliferation Assay

[0577] As described in FIG. 24, CTLL-2 is a mouse cytotoxic T lymphocyte cell line that is dependent on IL-2 for growth, and used as an in vitro functional model to measure potency of IL-2 as they express high affinity IL-2 receptor (IL-2R) consisting of CD122, CD132 and CD25, shown to be highly sensitive to IL-2 treatment (Carmenate et al., 2013).

[0578] Carmenate T, Pacios A, Enamorado M, Moreno E, Garcia-Martinez K, Fuente D, Leon K. Human IL-2 mutein with higher antitumor efficacy than wild-type IL-2. The Journal of Immunology (2013) 190:6230-6238.

[0579] CTTL2 cells were plated into 96 well plates at 30,000 cells per well in media lacking the TSTIM proliferation supplement. Following plating, cells were treated increasing concentrations of the various samples listed in Table 25 for 48 hours. After treatment, Cell Titer Blue viability reagent (Promega G8080) was added to each well and the plates were scanned after 3 hours at 560Ex/590Em for development of the fluorescent viability signal. Triplicate wells were tested at each concentration of the test samples.

TABLE 25
Test constructs in CTLL-2 assay

| | Construct | Concentrations tested |
|---|---|---|
| 1 | IL2 TP20284F | 0.3 pM to 0.33 nM by ~½ log |
| 2 | MDNA413-Fc-MDNA109 (KIH) | 10 pM to 10 nM by ~½ log |
| | (1:1:1) T1912B03 | |
| 3 | MDNA109FEAA-Fc-MDNA413 | 10 pM to 10 nM by ~½ log |
| | (2:1:2) T1924B08 | |
| 4 | Fc4-413 T1918B04 | 10 pM to 10 nM by ~½ log |
| 5 | MDNA132-Fc-MDNA109 (KIH) | 10 pM to 10 nM by ~½ log |
| | (1:1:1) T192B02 | |

### Results:

[0580] rhIL-2: shows dose-response of CTLL-2 cell proliferation to increasing concentration of rhIL-2 (as expected). rhIL-2 was used as a control.

### MDNA109FEAA-Fc-MDNA413:

[0581] Shows dose-response of CTLL-2 cell proliferation to increasing concentration of this construct. There is reduced potency with this construct (Ec50=53 pM) compared to rhIL2 (EC50=6.4 pM). This is expected since FEAA mutations abrogate binding to CD25, which is expressed by CTLL2.

### MDNA132-Fc-MDNA109 (KIH) and MDNA413-Fc-MDNA109 (KIH):

[0582] Very strong effect for both constructs as there was similar signals across the entire range of concentrations tested. This is expected since both constructs do not contain FEAA mutations and therefore can engage CD25. Additional, the MDNA109 components have increased binding CD122 and therefore much more potent than rhIL2 (which also binds CD25). To get dose-response curves, we will need to further reduce the concentrations of these 2 constructs in this assay.

### Fc4-MDNA413:

[0583] Does not induce CTLL2 proliferation as expected since there is no IL-2/MDNA109 moiety.

rhIL2 & MDNA19:

[0584] Historical data included here for comparison.

### REFERENCES

[0585] Chen X, Oppenheim J J, Howard O M. BALB/c mice have more CD4+CD25+ T regulatory cells and show greater susceptibility to suppression of their CD4+CD25− responder T cells than C57BL/6 mice. J Leukoc Biol. (2005) 78(1):114-21.
[0586] Levin A M, Bates D L, Ring A M, Krieg C, Lin J T, Su L, Moraga I, Raeber M E, Bowman G R, Novick P, Pande V S, Fathman C G, Boyman O, Garcia K C. Exploiting a natural conformational switch to engineer an interleukin-2 ‘superkine’. Nature (2012) 484(7395):529-33.

### Example 3: Emergence of Novel Long-Acting Mono- and Bi-Specific IL-2/IL-13 Superkines as Potent Immune Modulators

### Background:

[0587] Use of IL-2 (Proleukin) to treat renal carcinoma and metastatic melanoma achieved durable response in ˜15% of cases, but its application is limited due to its short half-life, toxicity and undesirable activation of Tregs, the latter due to binding to IL-2Rαβγ.

[0588] MDNA11 is a long-acting IL-2 Superkine with enhanced affinity to IL-2Rβγ (expressed by CD8+ T & NK cells) and diminished binding to IL-2Rαβγ (expressed by Tregs).

### Conclusions

[0589] MDNA11 demonstrated potent therapeutic efficacy in mouse tumor models as monotherapy and in combination with immune checkpoint inhibitor.

[0590] In NHP, MDNA11 exhibited prolonged half-life and induced durable proliferation and expansion of CD8 T cells, CD4 T helper cells, NK cells but not Tregs.

[0591] MDNA11 did not cause vascular leak syndrome (i.e pulmonary edema), hypertension, cytokine storm and anti-drug antibody response.

[0592] The versatility of IL-2 and IL-13 superkine platforms enables engineering of long-acting bi-specific constructs to simultaneously activate IL-2 signaling (i.e. pro-inflammatory) and suppress IL-4/IL-13 function (i.e. anti-inflammatory) to target immunologically ‘cold’ tumors.

[0593] Targeting immunologic “cold tumors” by modulation of TME (tumor microenvironment) with IL-2/IL-13 Bi-specific Superkines.

[0594] “Cold” tumors are not responsive to check-point inhibitors because of a pro-tumoral TME, including low CD8⁺& NK cell counts; high Treg counts and high number of immune-suppressive myeloid cells (i.e. TAM & MDSC).

### Example 4: MDNA132/MDNA413 Studies

[0595] The binding of MDNA132 and MDNA413 to IL-13Rα2 and IL-13Rα1 was assessed. Briefly, Receptors listed in Table 26 below were adsorbed to 96 well plates (at 1 μg per well) for 1 hour at room temperature in coating buffer (Carbonate pH 9.6). After coating, wells were washed 5 times with 250 μL of Tris-buffered Saline solution with Tween (TBST: 10 mM Tris HCl, 0.15 M NaCl, 0.1% Tween 20, pH 8.0) and then blocked with 250 μL of blocking buffer (1% BSA in TBS-T) for one hour at room temperature. Wells receiving no receptor were simply blocked with blocking buffer for one hour at room temperature. Wells were washed 5 times with TBST prior to sample addition. Samples were diluted as described and then 100 μL of each dilution was added to either receptor coated or albumin blocked wells for 1 hour at room temperature. Wells were then washed 5 times with TBST and probed with 100 μL of the detector antibody (1:5,000 dilution of anti-human IgG Fc Sigma SAB3701284) in blocking buffer (100 μL per well) at room temperature for 45 minutes. Wells were washed again and then incubated with an HRP-conjugated anti-goat IgG (Millipore 401515) for 45 minutes at room temperature. After a final series of washes, 100 μL of developer (0.1 mg/mL TMB, 0.006% hydrogen peroxide in TMB substrate buffer) was added. Plates were quenched after 10 minutes with 100 μL 1M HCl, and plates were scanned for absorbance at 450 nm to obtain optical density units (OD) for each well.

TABLE 26
Reagents

| Reagent | Source | Catalog |
|---|---|---|
| IL13Rα2 Protein, Human, Recombinant, His | Sino | 10350-H08H |
| Tag Source: HEK293 | Biological | 100 ug |
| IL13Rα2 Protein, Mouse, Recombinant, His | Sino | 50061-M08H |
| Tag Source: HEK293 | Biological | 100 ug |
| IL13Rα Protein, Human, Recombinant, His | Sino | 10943-H08H |
| Tag Source: HEK293 | Biological | 100 ug |
| IL13Rα1 Protein, Mouse, Recombinant, His | Sino | 50088-M08H |
| Tag Source: HEK293 | Biological | 100 ug |
| IL4Rαa Protein, Human, Recombinant (His | Sino | 10402-H08H |
| Tag) Source: HEK293 (aa 1-232, ECD) | Biological | 10 ug |
| IL4Rα Protein, Mouse, Recombinant (ECD, | Sino | 51180-M08H |
| His Tag) | Biological | 100 ug |
| Source: HEK293 (aa 1-233, ECD) | | |
| Human recombinant Fc-IL13 *Control) | Sino | 10369-H01H- |
| | Biological | 20 ug |

[0596] As shown in FIG. 35, good binding of Fc-hIL13 was observed on human and mouse IL13Rα2 receptor coated wells, although the mIL13Rα2 coated wells had overall higher background, possibly due to non-specific interactions either with the detector or the HRP-conjugated secondary antibodies. Low binding was observed on the mIL13Rα1 and bindings similar to uncoated wells were observed with hIL13Rα1, and the human and mouse IL4R receptors.

[0597] As shown in FIGS. 36A and 36B, MDNA132-Fc-MDNA109 (1:1:1) molecule does in fact bind to the human and mouse IL13Rα2 receptors with similar affinity as Fc-IL13.

[0598] As shown in FIGS. 37A and 37B, all MDNA413 variants showed binding on the human and mouse IL13Rα1 receptor. Binding was strongest and similar for the MDNA109FEAA-Fc-MDNA413 (2:1:2) and Fc4-MDNA413 molecules, while binding of MDNA109-Fc-MDNA413 (1:1:1) was similar to Fc-IL13.

### Example 5: MDNA132/MDNA413 Studies

[0599] Receptor binding affinity of MDNA132 and MDNA413 was assessed by surface plasmon resonance using Biacore T200 instrument. Briefly, Protein A (or anti-human Fc) was pre-immobilised on the sensor chip and captured each construct via its Fc portion. A receptor was flown over the surface to measure association, followed by a dissociation. Multiple concentrations of the receptors were tested in separate cycle, multi cycle kinetics (MCK).

[0600] As shown in FIG. 38, Fc-MDNA132 (1:1 KIH) bound to IL13Rα2 and not IL13Rα1. The K_{D} Fc-MDNA132 for IL13Rα2 is estimated to be 1.30E−09 M.

[0601] As shown in FIG. 39, Fc-MDNA413 (1:2) bound to IL13Rα1 with higher affinity when compared to wild type IL13. As shown in FIG. 40, Fc-MDNA413 (1:2) bound with lower affinity to IL13Rα2 in comparison to wild type IL13. The estimated K_{D} values from the assay are depicted in Table 27 below.

TABLE 27
Affinities

| Antigen | Ligand | K_{D} (M) |
|---|---|---|
| IL13Ra1 | Fc-WT IL13 | 6.80E−08 |
| | Fc-MDNA413(1:2) | 1.94E−08 |
| IL 13Ra2 | Fc-WT IL13 | 1.44E−10 |
| | Fc-MDNA413(1:2) | 9.73E−09 |

### Example 6: Modulation of Immune Responses to Cancer by Bi-Specific IL-2/IL-13 Superkines Background

[0602] The IL-2 pathway plays a vital role in stimulating a pro-inflammatory (Th1) response against cancer through expansion and activation of effector CD8 T and NK cells. In contrast, the IL-4/IL-13 pathway stimulates myeloid derived suppressor cells (MDSCs) and M2 skewing of tumor associated macrophage (TAM) to foster an anti-inflammatory (Th2) response that is often exploited by cancers as a means to dampen the effects of the Th1 pathway. Therefore, suppression of MDSC and M2 TAM through inhibition of the IL-4/IL-13 pathway together with stimulation of effector immune cells through activation of the IL-2 pathway have the potential to invigorate a pro-inflammatory response in an otherwise immune suppressive tumor microenvironment (TME). To achieve this goal, the versatility of IL-2 and IL-13 superkine platforms was leveraged to engineer long-acting bi-specific constructs to co-target surface receptors of the respective pathways.

### Materials and Methods

[0603] Studies included binding analyses by BLI/Octet and Biacore/SPR, signaling analyses using IL-2 and IL-4/IL-13 reporter assays, signaling analysis in human PBMC, and in vitro M1/M2 macrophage polarization assay.

[0604] The binding affinity to IL13Rα1 and IL13Rα2 by SPR (MCK, multi-cycle kinetics) was measured using the human IgG (Fc) Capture Chip principle, which utilizes the following steps: (1) Immobilization: Immobilized Anti-Human IgG (Fc) antibody on CM5 chip; (2) Capture: capture the IL-13 Protein, Fc Tag or sample; (3) Analyte: the analyte is Human IL-13 R alpha 1 Protein or Human IL-13 R alpha 2 Protein; and (4) Regeneration: 3 M magnesium chloride.

[0605] A pSTAT5 signaling assay in human PBMC was implemented as follows. PBMCs were isolated over a density gradient, allowed to rest in complete media, and then stimulated for 15 minutes with IL2, MDNA109FEAA-Fc or MDNA109FEAA-Fc-MDNA413. Controls included non-stimulated PBMC cells. Cells were fixed immediately following stimulation, and samples analyzed by flow cytometry after intracellular staining for phosphorylated STAT5 (P-STAT5) in the immune subsets, Naïve CD8 T cells (CD8+CD25−), NK cells and Tregs.

[0606] An assay was performed in HEK Blue IL-4/IL-13 reporter cells (from InvivoGen) to measure pSTAT6 signaling as follows. HEK-Blue IL-4/IL-13 reporter cells (Invivogen) were plated at 50,000 cells per well in the test medium per the manufacturer's instructions and treated with increasing concentrations of either hIL4 or hIL13 for 24 hours (standard curve. In addition, wells containing hIL13 or hIL4 were treated with increasing concentrations of the test samples. Each standard or test sample serial dilution was assayed in duplicate wells. After incubation, the cell supernatants (20 μL) were removed to a new plate and then 180 of QUANTI-Blue solution was added and incubated for 2 hours at 37° C. Plates were scanned on a conventional plate reader for absorbance at 650 nm.

[0607] A macrophage polarization assay was performed as follows. Monocytes were first isolated from fresh or thawed frozen vial of human peripheral blood mononuclear cells (PBMCs) from 2 donors using EasySep™ Human Monocyte Enrichment Kit without CD16 Depletion on RoboSep. Cells were then seeded onto low-bind 6-well plates at 2×10⁶ cells/well. Maturation of monocytes were then induced for 72 hrs using 50 ng/mL M-CSF exposure in media containing RPMI with L-glutamine (Gibco 21875-034), 10% FBS, 2% Pen-Strep, and incubated at 37° C. and 5% CO². Polarization was subsequently done using the IL-13 agonist or control for another 72 hrs, following which they were dissociated, fixed using BD CellFIX, stained and examined using flow cytometry.

[0608] A CT26 colon cancer syngeneic mouse model was developed and used as follows. Female BALB/c mice were implanted with 2×10⁶ CT26 cells subcutaneously in the right flank (study day 0) and allowed to grow for 11 days prior to the initiation of dosing. The average tumor size in the treatment group at time of dosing was about 60 mm³. MDNA132-Fc-MDNA109 was used at 5 mg/kg and the IP was QWx2.

### Results

[0609] FIG. 41A-41C, along with the K_{D} values in FIG. 41D, shows that Fc-MDNA413 binds to the functional receptor IL13Rα1 with a higher affinity than Fc-IL13. Also, the affinity to the decoy receptor, IL13Rα2 is reduced for Fc-MDNA413 in comparison to Fc-IL13. The higher binding affinity of Fc-MDNA413 for IL13Rα1 is also observed in the bispecific construct MDNA109FEAA-Fc-MDNA413 indicating that it can bind more strongly to IL13Rα1 receptor than Fc-IL-13.

[0610] FIG. 42A-42B shows that MDNA109FEAA-Fc-MDNA413 is able to activate signaling in naïve CD8 T cells and NK cells with a higher potency than rhIL-2. However, the potency is greatly reduced for pSTAT5 signaling in Tregs with MDNA109FEAA-Fc-MDNA413 in comparison to rhIL-2. These data show that MDNA109FEAA-Fc-MDNA413 is superior to rhIL-2 at activating immune effectors cell response required for achieve anti-cancer efficacy.

[0611] FIG. 43A-43C shows that both Fc-MDNA413 (monospecific) and MDNA109FEAA-Fc-MDNA413 (bispecific) are able to inhibit the IL4 (top panel) and IL13 (bottom panel) induced pSTAT6 signaling in the HEK Blue reporter cells with EC₅₀ as shown in the table above. These data showed that Fc-MDNA413 and MDNA109FFEAA-Fc-MDNA413 can suppress IL-4 and IL-13 induced signaling.

[0612] FIG. 44A-44B shows that CD209 is a marker for M2 macrophages and is induced upon IL13 stimulation. As seen from the figure above, both Fc-MDNA413 (monospecific) and MDNA109FEAA-Fc-MDNA413 (bispecific) are able to inhibit the IL13 induced M2 polarization of macrophages in a dose dependent manner.

[0613] FIG. 45A-45D, along with the K_{D} values in FIG. 45E, shows that Fc-MDNA132 has preferential binding affinity for the decoy receptor, IL13Rα2 wherein no binding is observed to the functional receptor, IL13Rα1. In contrast, Fc-IL13 binds to both the functional receptor, IL13Rα1 and the decoy receptor, IL13Rα2. These data emphasize the strong receptor selectivity profile of Fc-MDNA132.

[0614] FIG. 46A-46C shows that the bispecific construct MDNA132-Fc-MDNA109 is able to inhibit the tumor growth in the CT26 colon cancer model and also, extend overall survival in comparison to the vehicle control.

[0615] sIL2^{M}-Fc-sIL13^{M} is a bi-specific superkine composed of an IL-2 super-agonist (sIL2^{M}) and IL-13 super-antagonist (sIL13M) linked together by human IgG1 Fc. sIL2^{M} binds CD122 with superior affinity over IL-2 but does not engage CD25, which is expressed on immune-suppressive Tregs. sIL13^{M} has higher affinity than IL-13 for IL13Rα1, which together with IL-4Rα forms a functional receptor complex. In pSTAT5 assay using primary human PBMCs, sIL2^{M}-Fc-sIL13^{M} showed enhanced potency over IL-2 in the activation of CD8 T-cells and NK cells while exhibiting limited activity on Treg. In an IL-4/IL-13 dependent pSTAT6 reporter assay, sIL2^{M}-Fc-sIL13^{M} demonstrated dose-dependent antagonism against stimulatory activity of both IL-4 and IL-13. This antagonistic effect was further validated with inhibition of IL-13 induced M2 polarization of macrophages in vitro.

### Conclusions

[0616] sIL2^{M}-Fc-sIL13^{M} is a bi-specific superkine capable of concomitantly stimulating a Th1 response through activation of the IL-2 pathway and suppressing a Th2 response through inhibition of the IL-4/IL-13 pathway. Additional bi-specific superkine constructs will be tested, including those designed to enable accumulation in TME by engaging the decoy IL-13Rα2 that is overexpressed on a number of different tumor types.

TABLE 28
List of Bispecific Fusion Constructs with Mutations Specified

| Name | Sequence | Mutations |
|---|---|---|
| Fc-MDNA413 | Gene 1 and Gene 2 (Version A) | MDNA413 |
| (1:2) | DKTHTCPPCPAPELLGGPSVFLFPPKPKDTLMISRTPEVTCVVVDVSHE | mutations: |
| | DPEVKFNWYVDGVEVHNAKTKPREEQYASTYRVVSVLTVLHQDWLNGKE | L10V, E12A, |
| | YKCKVSNKALPAPIEKTISKAKGQPREPQVYTLPPSRDELTKNQVSLTC | V18I, L39R, |
| | LVKGFYPSDIAVEWESNGQPENNYKTTPPVLDSDGSFFLYSKLTVDKSR | R65D, D87S, |
| | WQQGNVFSCSVMHEALHNHYTQKSLSLSPGGGGGSGGGGSGGGGSPGPV | T88S, L101F, |
| | PPSTAVRALIEELINITQNQKAPLCNGSMVWSINRTAGMYCAALESLIN | K104R, K105T |
| | VSGCSAIEKTQDMLSGFCPHKVSAGQFSSLHVRSSKIEVAQFVKDLLFH | |
| | LRTLFREGQFN (SEQ ID NO: 168) | |
| Fc- | DKTHTCPPCPAPELLGGPSVFLFPPKPKDTLMISRTPEVTCVVVDVSHE | L10V, E12A, |
| MDNA413^{R39/Q111} | DPEVKFNWYVDGVEVHNAKTKPREEQYASTYRVVSVLTVLHQDWLNGKE | V18I, L39R, |
| (1:2) | YKCKVSNKALPAPIEKTISKAKGQPREPQVYTLPPSRDELTKNQVSLTC | R65D, D87S, |
| | LVKGFYPSDIAVEWESNGQPENNYKTTPPVLDSDGSFFLYSKLTVDKSR | T88S, L101F, |
| | WQQGNVFSCSVMHEALHNHYTQKSLSLSPGGGGGSGGGGSGGGGSPGPV | K104R, K105T |
| | PPSTAVRALIEELINITQNQKAPLCNGSMVWSINRTAGMYCAALESLIN | |
| | VSGCSAIEKTQDMLSGFCPHKVSAGQFSSLHVRSSKIEVAQFVKDLLFH | |
| | LRTLFREGQFN (SEQ ID NO: 231) | |
| Fc-MDNA132 | Gene 1 (Version A) | MDNA132 |
| (1:1 KIH) | DKTHTCPPCPAPELLGGPSVFLFPPKPKDTLMISRTPEVTCVVVDVSHE | mutations: |
| | DPEVKFNWYVDGVEVHNAKTKPREEQYASTYRVVSVLTVLHQDWLNGKE | L10H, R86T, |
| | YKCKVSNKALPAPIEKTISKAKGQPREPQVYTLPPSRDELTKNQVSLTC | D87G, T88R, |
| | LVKGFYPSDIAVEWESNGQPENNYKTTPPVLDSDGSFFLYSKLTVDKSR | R108K |
| | WQQGNVFSCSVMHEALHNHYTQKSLSLSPGGGGGSGGGGSGGGGSPGPV | |
| | PPSTAHRELIEELVNITQNQKAPLCNGSMVWSINLTAGMYCAALESLIN | |
| | VSGCSAIEKTQRMLSGFCPHKVSAGQFSSLHVTGRKIEVAQFVKDLLLH | |
| | LKKLFKEGQFN (SEQ ID NO: 169) | |
| Fc- | Gene 1: | L10H, R86T, |
| MDNA132^{L39/Q111} | DKTHTCPPCPAPELLGGPSVFLFPPKPKDTLMISRTPEVTCVVVDVSHE | D87G, T88R, |
| (1:1 | DPEVKFNWYVDGVEVHNAKTKPREEQYASTYRVVSVLTVLHQDWLNGKE | R108K |
| KIH) | YKCKVSNKALPAPIEKTISKAKGQPREPQVYTLPPCRDELTKNQVSLWC | |
| | LVKGFYPSDIAVEWESNGQPENNYKTTPPVLDSDGSFFLYSKLTVDKSR | |
| | WQQGNVFSCSVMHEALHNHYTQKSLSLSPGGGGGSGGGGSGGGGSPGPV | |
| | PPSTAHRELIEELVNITQNQKAPLCNGSMVWSINLTAGMYCAALESLIN | |
| | VSGCSAIEKTQRMLSGFCPHKVSAGQFSSLHVTGRKIEVAQFVKDLLLH | |
| | LKKLFKEGQFN (SEQ ID NO: 232) | |
| Fc-MDNA132^{L39/R111} | Gene 1: | L10H, R86T, |
| (1:1 KIH) | DKTHTCPPCPAPELLGGPSVFLFPPKPKDTLMISRTPEVTCVVVDVSHE | D87G, T88R, |
| | DPEVKFNWYVDGVEVHNAKTKPREEQYASTYRVVSVLTVLHQDWLNGKE | R108K |
| | YKCKVSNKALPAPIEKTISKAKGQPREPQVYTLPPSRDELTKNQVSLTC | |
| | LVKGFYPSDIAVEWESNGQPENNYKTTPPVLDSDGSFFLYSKLTVDKSR | |
| | WQQGNVFSCSVMHEALHNHYTQKSLSLSPGGGGGSGGGGSGGGGSPGPV | |
| | PPSTAHRELIEELVNITQNQKAPLCNGSMVWSINLTAGMYCAALESLIN | |
| | VSGCSAIEKTQRMLSGFCPHKVSAGQFSSLHVTGRKIEVAQFVKDLLLH | |
| | LKKLFKEGRFN (SEQ ID NO: 233) | |
| Fc-MDNA132 | Gene 1 (Version B) | MDNA132 |
| (1:1 KIH) | DKTHTCPPCPAPELLGGPSVFLFPPKPKDTLMISRTPEVTCVVVDVSHE | mutations: |
| | DPEVKFNWYVDGVEVHNAKTKPREEQYASTYRVVSVLTVLHQDWLNGKE | L10H, L39R, |
| | YKCKVSNKALPAPIEKTISKAKGQPREPQVYTLPPSRDELTKNQVSLTC | R86T, D87G, |
| | LVKGFYPSDIAVEWESNGQPENNYKTTPPVLDSDGSFFLYSKLTVDKSR | T88R, R108K |
| | WQQGNVFSCSVMHEALHNHYTQKSLSLSPGGGGGSGGGGSGGGGSPGPV | |
| | PPSTAHRELIEELVNITQNQKAPLCNGSMVWSINRTAGMYCAALESLIN | |
| | VSGCSAIEKTQRMLSGFCPHKVSAGQFSSLHVTGRKIEVAQFVKDLLLH | |
| | LKKLFKEGQFN (SEQ ID NO: 170) | |
| Fc-MDNA132 | Gene 2 (Version A) | |
| (1:1 KIH) | DKTHTCPPCPAPELLGGPSVFLFPPKPKDTLMISRTPEVTCVVVDVSHE | |
| | DPEVKFNWYVDGVEVHNAKTKPREEQYASTYRVVSVLTVLHQDWLNGKE | |
| | YKCKVSNKALPAPIEKTISKAKGQPREPQVCTLPPSRDELTKNQVSLSC | |
| | AVKGFYPSDIAVEWESNGQPENNYKTTPPVLDSDGSFFLVSKLTVDKSR | |
| | WQQGNVFSCSVMHEALHNHYTQKSLSLSPG (SEQ ID NO: 171) | |
| Fc - | Gene 2: | |
| MDNA132^{L39/Q111} | DKTHTCPPCPAPELLGGPSVFLFPPKPKDTLMISRTPEVTCVVVDVSHE | |
| (1:1 | DPEVKFNWYVDGVEVHNAKTKPREEQYASTYRVVSVLTVLHQDWLNGKE | |
| KIH) | YKCKVSNKALPAPIEKTISKAKGQPREPQVCTLPPSRDELTKNQVSLSC | |
| | AVKGFYPSDIAVEWESNGQPENNYKTTPPVLDSDGSFFLVSKLTVDKSR | |
| | WQQGNVFSCSVMHEALHNHYTQKSLSLSPG (SEQ ID NO: 234) | |
| Fc-MDNA132^{L39/R111} | Gene 2: | |
| (1:1 KIH) | DKTHTCPPCPAPELLGGPSVFLFPPKPKDTLMISRTPEVTCVVVDVSHE | |
| | DPEVKFNWYVDGVEVHNAKTKPREEQYASTYRVVSVLTVLHQDWLNGKE | |
| | YKCKVSNKALPAPIEKTISKAKGQPREPQVCTLPPSRDELTKNQVSLSC | |
| | AVKGFYPSDIAVEWESNGQPENNYKTTPPVLDSDGSFFLVSKLTVDKSR | |
| | WQQGNVFSCSVMHEALHNHYTQKSLSLSPG (SEQ ID NO: 235) | |
| MDNA109FEAA- | Gene 1 (Version A) | MDNA109 |
| Fc- | APTSSSTKKTQLQLEHLLLDLQMILNGINNYKNPKLTRMLTAKFYMPKK | mutations: |
| MDNA413 | ATELKHLQCLEEALKPLEEVLNLAQSKNFHFDPRDVVSNINVFVLELKG | F42A, E62A, |
| (2:1:2) | SETTFMCEYADETATIVEFLNRWITFSQSIISTLTGGGGSGGGGSGGGG | L80F, R81D, |
| | SDKTHTCPPCPAPELLGGPSVFLFPPKPKDTLMISRTPEVTCVVVDVSH | L85V, I86V, |
| | EDPEVKFNWYVDGVEVHNAKTKPREEQYASTYRVVSVLTVLHQDWLNGK | I92F, C125S |
| | EYKCKVSNKALPAPIEKTISKAKGQPREPQVYTLPPSRDELTKNQVSLT | MDNA413 |
| | CLVKGFYPSDIAVEWESNGQPENNYKTTPPVLDSDGSFFLYSKLTVDKS | mutations: |
| | RWQQGNVFSCSVMHEALHNHYTQKSLSLSPGGGGGSGGGGSGGGGSPGP | L10V, E12A, |
| | VPPSTAVRALIEELINITQNQKAPLCNGSMVWSINRTAGMYCAALESLI | V18I, L39R, |
| | NVSGCSAIEKTQDMLSGFCPHKVSAGQFSSLHVRSSKIEVAQFVKDLLF | R65D, D87S, |
| | HLRTLFREGQFN (SEQ ID NO: 172) | T88S, L101F, |
| | | K104R, K105T |
| MDNA109FEAA^{C125}- | APTSSSTKKTQLQLEHLLLDLQMILNGINNYKNPKLTRMLTAKFYMPKK | MDNA109FEAA |
| Fc- | ATELKHLQCLEEALKPLEEVLNLAQSKNFHFDPRDVVSNINVFVLELKG | mutations: |
| MDNA413^{R39/Q111} | SETTFMCEYADETATIVEFLNRWITFCQSIISTLTGGGGSGGGGSGGGG | F42A, E62A, |
| (2:1:2) | SDKTHTCPPCPAPELLGGPSVFLFPPKPKDTLMISRTPEVTCVVVDVSH | L80F, R81D, |
| | EDPEVKFNWYVDGVEVHNAKTKPREEQYASTYRVVSVLTVLHQDWLNGK | L85V, 186V |
| | EYKCKVSNKALPAPIEKTISKAKGQPREPQVYTLPPSRDELTKNQVSLT | I92F |
| | CLVKGFYPSDIAVEWESNGQPENNYKTTPPVLDSDGSFFLYSKLTVDKS | MDNA413 |
| | RWQQGNVFSCSVMHEALHNHYTQKSLSLSPGGGGGSGGGGSGGGGSPGP | mutations: |
| | VPPSTAVRALIEELINITQNQKAPLCNGSMVWSINRTAGMYCAALESLI | L10V, E12A, |
| | NVSGCSAIEKTQDMLSGFCPHKVSAGQFSSLHVRSSKIEVAQFVKDLLF | L39R, V18I, |
| | HLRTLFREGQFN (SEQ ID NO: 236) | R65D, D87S, |
| | | T88S, L101F, |
| | | K104R, K105T |
| MDNA109FEAA- | Gene 1 (Version B) | MDNA109 |
| Fc- | APTSSSTKKTQLQLEHLLLDLQMILNGINNYKNPKLTRMLTAKFYMPKK | mutations: |
| MDNA413 | ATELKHLQCLEEALKPLEEVLNLAQSKNFHFDPRDVVSNINVFVLELKG | F42A, E62A, |
| (2:1:2) | SETTFMCEYADETATIVEFLNRWITFCQSIISTLTGGGGSGGGGSGGGG | L80F, R81D, |
| | SDKTHTCPPCPAPELLGGPSVFLFPPKPKDTLMISRTPEVTCVVVDVSH | L85V, I86V, |
| | EDPEVKFNWYVDGVEVHNAKTKPREEQYASTYRVVSVLTVLHQDWLNGK | I92F |
| | EYKCKVSNKALPAPIEKTISKAKGQPREPQVYTLPPSRDELTKNQVSLT | MDNA413 |
| | CLVKGFYPSDIAVEWESNGQPENNYKTTPPVLDSDGSFFLYSKLTVDKS | mutations: |
| | RWQQGNVFSCSVMHEALHNHYTQKSLSLSPGGGGGSGGGGSGGGGSPGP | L10V, E12A, |
| | VPPSTAVRALIEELINITQNQKAPLCNGSMVWSINRTAGMYCAALESLI | V18I, L39R, |
| | NVSGCSAIEKTQDMLSGFCPHKVSAGQFSSLHVRSSKIEVAQFVKDLLF | R65D, D87S, |
| | HLRTLFREGQFN (SEQ ID NO: 173) | T88S, L101F, |
| | | K104R, K105T |
| MDNA132- | Gene 1 (Version A) | MDNA132 |
| Fc-MDNA109 | PGPVPPSTAHRELIEELVNITQNQKAPLCNGSMVWSINLTAGMYCAALE | mutations: |
| (1:1:1 | SLINVSGCSAIEKTQRMLSGFCPHKVSAGQFSSLHVTGRKIEVAQFVKD | L10H, R86T, |
| KIH) | LLLHLKKLFKEGQFNGGGGSGGGGSGGGGSDKTHTCPPCPAPELLGGPS | D87G, T88R, |
| | VFLFPPKPKDTLMISRTPEVTCVVVDVSHEDPEVKFNWYVDGVEVHNAK | R108K |
| | TKPREEQYASTYRVVSVLTVLHQDWLNGKEYKCKVSNKALPAPIEKTIS | MDNA109 |
| | KAKGQPREPQVYTLPPSRDELTKNQVSLTCLVKGFYPSDIAVEWESNGQ | mutations: |
| | PENNYKTTPPVLDSDGSFFLYSKLTVDKSRWQQGNVFSCSVMHEALHNH | L80F, R81D, |
| | YTQKSLSLSPGGGGGSGGGGSGGGGSAPTSSSTKKTQLQLEHLLLDLQM | L85V, I86V, |
| | ILNGINNYKNPKLTRMLTFKFYMPKKATELKHLQCLEEELKPLEEVLNL | I92F C125S |
| | AQSKNFHFDPRDVVSNINVFVLELKGSETTFMCEYADETATIVEFLNRW | |
| | ITFSQSIISTLT (SEQ ID NO: 174) | |
| MDNA132^{L39/Q111}- | PGPVPPSTAHRELIEELVNITQNQKAPLCNGSMVWSINLTAGMYCAALE | MDNA132 |
| Fc- | SLINVSGCSAIEKTQRMLSGFCPHKVSAGQFSSLHVTGRKIEVAQFVKD | mutations: |
| MDNA109 | LLLHLKKLFKEGQFNGGGGSGGGGSGGGGSDKTHTCPPCPAPELLGGPS | L10H, R86T, |
| (1:1:1 | VFLFPPKPKDTLMISRTPEVTCVVVDVSHEDPEVKFNWYVDGVEVHNAK | D87G, T88R, |
| KIH) | TKPREEQYASTYRVVSVLTVLHQDWLNGKEYKCKVSNKALPAPIEKTIS | R108K |
| | KAKGQPREPQVYTLPPSRDELTKNQVSLTCLVKGFYPSDIAVEWESNGQ | MDNA109 |
| | PENNYKTTPPVLDSDGSFFLYSKLTVDKSRWQQGNVFSCSVMHEALHNH | mutations: |
| | YTQKSLSLSPGGGGGSGGGGSGGGGSAPTSSSTKKTQLQLEHLLLDLQM | L80F, R81D, |
| | ILNGINNYKNPKLTRMLTFKFYMPKKATELKHLQCLEEELKPLEEVLNL | L85V, I86V, |
| | AQSKNFHFDPRDVVSNINVFVLELKGSETTFMCEYADETATIVEFLNRW | I92F |
| | ITFCQSIISTLT (SEQ ID NO: 237) | |
| MDNA132- | Gene 1 (Version B) | MDNA132 |
| Fc-MDNA109 | PGPVPPSTAHRELIEELVNITQNQKAPLCNGSMVWSINLTAGMYCAALE | mutations: |
| (1:1:1 | SLINVSGCSAIEKTQRMLSGFCPHKVSAGQFSSLHVTGRKIEVAQFVKD | L10H, R86T, |
| KIH) | LLLHLKKLFKEGQFNGGGGSGGGGSGGGGSDKTHTCPPCPAPELLGGPS | D87G, T88R, |
| | VFLFPPKPKDTLMISRTPEVTCVVVDVSHEDPEVKFNWYVDGVEVHNAK | R108K |
| | TKPREEQYASTYRVVSVLTVLHQDWLNGKEYKCKVSNKALPAPIEKTIS | MDNA109 |
| | KAKGQPREPQVYTLPPSRDELTKNQVSLTCLVKGFYPSDIAVEWESNGQ | mutations: |
| | PENNYKTTPPVLDSDGSFFLYSKLTVDKSRWQQGNVFSCSVMHEALHNH | L80F, R81D, |
| | YTQKSLSLSPGGGGGSGGGGSGGGGSAPTSSSTKKTQLQLEHLLLDLQM | L85V, I86V, |
| | ILNGINNYKNPKLTRMLTFKFYMPKKATELKHLQCLEEELKPLEEVLNL | I92F |
| | AQSKNFHFDPRDVVSNINVFVLELKGSETTFMCEYADETATIVEFLNRW | |
| | ITFCQSIISTLT (SEQ ID NO: 175) | |
| MDNA132- | Gene 1 (Version C) | MDNA132 |
| Fc-MDNA109 | PGPVPPSTAHRELIEELVNITQNQKAPLCNGSMVWSINRTAGMYCAALE | mutations: |
| (1:1:1 | SLINVSGCSAIEKTQRMLSGFCPHKVSAGQFSSLHVTGRKIEVAQFVKD | L10H, L39R, |
| KIH) | LLLHLKKLFKEGQFNGGGGSGGGGSGGGGSDKTHTCPPCPAPELLGGPS | R86T, D87G, |
| | VFLFPPKPKDTLMISRTPEVTCVVVDVSHEDPEVKFNWYVDGVEVHNAK | T88R, R108K |
| | TKPREEQYASTYRVVSVLTVLHQDWLNGKEYKCKVSNKALPAPIEKTIS | MDNA109 |
| | KAKGQPREPQVYTLPPSRDELTKNQVSLTCLVKGFYPSDIAVEWESNGQ | mutations: |
| | PENNYKTTPPVLDSDGSFFLYSKLTVDKSRWQQGNVFSCSVMHEALHNH | L80F, R81D, |
| | YTQKSLSLSPGGGGGSGGGGSGGGGSAPTSSSTKKTQLQLEHLLLDLQM | L85V, I86V, |
| | ILNGINNYKNPKLTRMLTFKFYMPKKATELKHLQCLEEELKPLEEVLNL | I92F, C125S |
| | AQSKNFHFDPRDVVSNINVFVLELKGSETTFMCEYADETATIVEFLNRW | |
| | ITFSQSIISTLT (SEQ ID NO: 174) | |
| MDNA132- | Gene 1 (Version D) | MDNA132 |
| Fc-MDNA109 | PGPVPPSTAHRELIEELVNITQNQKAPLCNGSMVWSINRTAGMYCAALE | mutations: |
| (1:1:1 | SLINVSGCSAIEKTQRMLSGFCPHKVSAGQFSSLHVTGRKIEVAQFVKD | L10H, L39R, |
| KIH) | LLLHLKKLFKEGQFNGGGGSGGGGSGGGGSDKTHTCPPCPAPELLGGPS | R86T, D87G, |
| | VFLFPPKPKDTLMISRTPEVTCVVVDVSHEDPEVKFNWYVDGVEVHNAK | T88R, R108K |
| | TKPREEQYASTYRVVSVLTVLHQDWLNGKEYKCKVSNKALPAPIEKTIS | MDNA109 |
| | KAKGQPREPQVYTLPPSRDELTKNQVSLTCLVKGFYPSDIAVEWESNGQ | mutations: |
| | PENNYKTTPPVLDSDGSFFLYSKLTVDKSRWQQGNVFSCSVMHEALHNH | L80F, R81D, |
| | YTQKSLSLSPGGGGGSGGGGSGGGGSAPTSSSTKKTQLQLEHLLLDLQM | L85V, I86V, |
| | ILNGINNYKNPKLTRMLTFKFYMPKKATELKHLQCLEEELKPLEEVLNL | I92F |
| | AQSKNFHFDPRDVVSNINVFVLELKGSETTFMCEYADETATIVEFLNRW | |
| | ITFCQSIISTLT (SEQ ID NO: 175) | |
| MDNA132- | Gene 2 (Version A) | Fc portion |
| Fc-MDNA109 | DKTHTCPPCPAPELLGGPSVFLFPPKPKDTLMISRTPEVTCVVVDVSHE | |
| (1:1:1 | DPEVKFNWYVDGVEVHNAKTKPREEQYASTYRVVSVLTVLHQDWLNGKE | |
| KIH) | YKCKVSNKALPAPIEKTISKAKGQPREPQVCTLPPSREEMTKNQVSLSC | |
| | AVKGFYPSDIAVEWESNGQPENNYKTTPPVLDSDGSFFLVSKLTVDKSR | |
| | WQQGNVFSCSVMHEALHNHYTQKSLSLSPGK (SEQ ID NO: 213) | |
| MDNA132^{L39/Q111}- | Gene 2: | |
| Fc- | DKTHTCPPCPAPELLGGPSVFLFPPKPKDTLMISRTPEVTCVVVDVSHE | |
| MDNA109 | DPEVKFNWYVDGVEVHNAKTKPREEQYASTYRVVSVLTVLHQDWLNGKE | |
| (1:1:1 | YKCKVSNKALPAPIEKTISKAKGQPREPQVCTLPPSREEMTKNQVSLSC | |
| KIH) | AVKGFYPSDIAVEWESNGQPENNYKTTPPVLDSDGSFFLVSKLTVDKSR | |
| | WQQGNVFSCSVMHEALHNHYTQKSLSLSPGK (SEQ ID NO: 238) | |
| MDNA413^{R39/Q111}- | Gene 1: | MDNA413 |
| Fc- | PGPVPPSTAVRALIEELINITQNQKAPLCNGSMVWSINRTAGMYCAALE | mutations: |
| MDNA132^{L39/Q111} | SLINVSGCSAIEKTQDMLSGFCPHKVSAGQFSSLHVRSSKIEVAQFVKD | L10V, E12A, |
| (2:1:1 | LLFHLRTLFREGQFN [symbol] DKTHTCPPCPAPELLGGPS | L39R, V18I, |
| KIH) | VFLFPPKPKDTLMISRTPEVTCVVVDVSHEDPEVKFNWYVDGVEVHNAK | R65D, D87S, |
| | TKPREEQYASTYRVVSVLTVLHQDWLNGKEYKCKVSNKALPAPIEKTIS | T88S, L101F |
| | KAKGQPREPQVYTLPPCRDELTKNQVSLWCLVKGFYPSDIAVEWESNGQ | K104R, K105T |
| | PENNYKTTPPVLDSDGSFFLYSKLTVDKSRWQQGNVFSCSVMHEALHNH | MDNA132 |
| | YTQKSLSLSPG [symbol] PGPVPPSTAHRELIEELVNITQN | mutations: |
| | QKAPLCNGSMVWSINLTAGMYCAALESLINVSGCSAIEKTQRMLSGFCP | L10H, R86T, |
| | HKVSAGQFSSLHVTGRKIEVAQFVKDLLLHLKKLFKEGQFN (SEQ ID | D87G, T88R, |
| | NO: 177) | R108K |
| | Gene 2: | |
| | PGPVPPSTAVRALIEELINITONQKAPLCNGSMVWSINRTAGMYCAALE | |
| | SLINVSGCSAIEKTQDMLSGFCPHKVSAGQFSSLHVRSSKIEVAQFVKD | |
| | LLFHLRTLFREGQFN [symbol] DKTHTCPPCPAPELLGGPS | |
| | VFLFPPKPKDTLMISRTPEVTCVVVDVSHEDPEVKFNWYVDGVEVHNAK | |
| | TKPREEQYASTYRVVSVLTVLHQDWLNGKEYKCKVSNKALPAPIEKTIS | |
| | KAKGQPREPQVCTLPPSRDELTKNQVSLSCAVKGFYPSDIAVEWESNGQ | |
| | PENNYKTTPPVLDSDGSFFLVSKLTVDKSRWQQGNVFSCSVMHEALHNH | |
| | YTQKSLSLSPG (SEQ ID NO: 178) | |
| Fc4- | APPCPSCPAPEFLGGPSVFLFPPKPKDTLMISRTPEVTCVVVDVSQEDP | L10V, E12A, |
| MDNA413^{R39/Q111} | EVQFNWYVDGVEVHNAKTKPREEQFNSTYRVVSVLTVLHQDWLNGKEYK | L39R, V18I, |
| (1:2) | CKVSNKGLPSSIEKTISKAKGQPREPQVYTLPPSQEEMTKNQVSLTCLV | R65D, D87S, |
| | KGFYPSDIAVEWESNGQPENNYKTTPPVLDSDGSFFLYSRLTVDKSRWQ | T88S, L101F, |
| | EGNVFSCSVMHEALHNHYTQKSLSLSPGKGGGSGSPGPVPPSTAVRALI | K104R, K105T |
| | EELINITQNQKAPLCNGSMVWSINRTAGMYCAALESLINVSGCSAIEKT | |
| | QDMLSGFCPHKVSAGQFSSLHVRSSKIEVAQFVKDLLFHLRTLFREGQF | |
| | N (SEQ ID NO: 179) | |
| MDNA413^{R39/Q111}- | Gene 1: | MDNA413 |
| Fc- | PGPVPPSTAVRALIEELINITONQKAPLCNGSMVWSINRTAGMYCAALE | mutations: |
| MDNA109 | SLINVSGCSAIEKTQDMLSGFCPHKVSAGQFSSLHVRSSKIEVAQFVKD | L10V, E12A, |
| (1:1:1 | LLFHLRTLFREGQFN [symbol] DKTHTCPPCPAPELLGGPS | L39R, V18I, |
| KIH) | VFLFPPKPKDTLMISRTPEVTCVVVDVSHEDPEVKFNWYVDGVEVHNAK | R65D, D87S, |
| | TKPREEQYASTYRVVSVLTVLHQDWLNGKEYKCKVSNKALPAPIEKTIS | T88S, L101F |
| | KAKGQPREPQVYTLPPCREEMTKNQVSLWCLVKGFYPSDIAVEWESNGQ | K104R, K105T |
| | PENNYKTTPPVLDSDGSFFLYSKLTVDKSRWQQGNVFSCSVMHEALHNH | MDNA109 |
| | YTQKSLSLSPG [symbol] APTSSSTKKTQLQLEHLL | mutations: |
| | LDLQMILNGINNYKNPKLTRMLTFKFYMPKKATELKHLQCLEEELKPLE | L80F, R81D, |
| | EVLNLAQSKNFHFDPRDVVSNINVFVLELKGSETTFMCEYADETATIVE | L85V, I86V, |
| | FLNRWITFCQSIISTLT (SEQ ID NO: 180) | I92F |
| | Gene 2: | |
| | DKTHTCPPCPAPELLGGPSVFLFPPKPKDTLMISRTPEVTCVVVDVSHE | |
| | DPEVKFNWYVDGVEVHNAKTKPREEQYASTYRVVSVLTVLHQDWLNGKE | |
| | YKCKVSNKALPAPIEKTISKAKGQPREPQVCTLPPSREEMTKNQVSLSC | |
| | AVKGFYPSDIAVEWESNGQPENNYKTTPPVLDSDGSFFLVSKLTVDKSR | |
| | WQQGNVFSCSVMHEALHNHYTQKSLSLSPGK (SEQ ID NO: 181) | |
| Fc- | DKTHTCPPCPAPELLGGPSVFLFPPKPKDTLMISRTPEVTCVVVDVSHE | L10V, E12A, |
| MDNA413^{L39/Q111} | DPEVKFNWYVDGVEVHNAKTKPREEQYASTYRVVSVLTVLHQDWLNGKE | V18I, R65D, |
| (1:2) | YKCKVSNKALPAPIEKTISKAKGQPREPQVYTLPPSRDELTKNQVSLTC | D87S, T88S, |
| | LVKGFYPSDIAVEWESNGQPENNYKTTPPVLDSDGSFFLYSKLTVDKSR | L101F, |
| | WQQGNVFSCSVMHEALHNHYTQKSLSLSPGGGGGSGGGGSGGGGSPGPV | K104R, K105T |
| | PPSTAVRALIEELINITQNQKAPLCNGSMVWSINLTAGMYCAALESLIN | |
| | VSGCSAIEKTQDMLSGFCPHKVSAGQFSSLHVRSSKIEVAQFVKDLLFH | |
| | LRTLFREGQFN (SEQ ID NO: 182) | |
| MDNA132^{L39/R111}- | Gene 1: | L10H, R86T, |
| Fc | PGPVPPSTAHRELIEELVNITQNQKAPLCNGSMVWSINLTAGMYCAALE | D87G, T88R, |
| (1:1 KIH) | SLINVSGCSAIEKTQRMLSGFCPHKVSAGQFSSLHVTGRKIEVAQFVKD | R108K |
| | LLLHLKKLFKEGRFN [symbol] DKTHTCPPCPAPELLGGPS | |
| | VFLFPPKPKDTLMISRTPEVTCVVVDVSHEDPEVKFNWYVDGVEVHNAK | |
| | TKPREEQYASTYRVVSVLTVLHQDWLNGKEYKCKVSNKALPAPIEKTIS | |
| | KAKGQPREPQVYTLPPSRDELTKNQVSLTCLVKGFYPSDIAVEWESNGQ | |
| | PENNYKTTPPVLDSDGSFFLYSKLTVDKSRWQQGNVFSCSVMHEALHNH | |
| | YTQKSLSLSPG (SEQ ID NO: 183) | |
| | Gene 2: | |
| | DKTHTCPPCPAPELLGGPSVFLFPPKPKDTLMISRTPEVTCVVVDVSHE | |
| | DPEVKFNWYVDGVEVHNAKTKPREEQYASTYRVVSVLTVLHQDWLNGKE | |
| | YKCKVSNKALPAPIEKTISKAKGQPREPQVYTLPPSRDELTKNQVSLTC | |
| | LVKGFYPSDIAVEWESNGQPENNYKTTPPVLDSDGSFFLYSKLTVDKSR | |
| | WQQGNVFSCSVMHEALHNHYTQKSLSLSPG (SEQ ID NO: 184) | |
| Fc- | DKTHTCPPCPAPELLGGPSVFLFPPKPKDTLMISRTPEVTCVVVDVSHE | L10H, R86T, |
| MDNA132^{L39/R111} | DPEVKFNWYVDGVEVHNAKTKPREEQYASTYRVVSVLTVLHQDWLNGKE | D87G, T88R, |
| (1:2) | YKCKVSNKALPAPIEKTISKAKGQPREPQVYTLPPSRDELTKNQVSLTC | R108K |
| | LVKGFYPSDIAVEWESNGQPENNYKTTPPVLDSDGSFFLYSKLTVDKSR | |
| | WQQGNVFSCSVMHEALHNHYTQKSLSLSPGGGGGSGGGGSGGGGSPGPV | |
| | PPSTAHRELIEELVNITQNQKAPLCNGSMVWSINLTAGMYCAALESLIN | |
| | VSGCSAIEKTQRMLSGFCPHKVSAGQFSSLHVTGRKIEVAQFVKDLLLH | |
| | LKKLFKEGRFN (SEQ ID NO: 185) | |
| Fc- | DKTHTCPPCPAPELLGGPSVFLFPPKPKDTLMISRTPEVTCVVVDVSHE | L10V, E12A, |
| MDNA413^{L39/R111} | DPEVKFNWYVDGVEVHNAKTKPREEQYASTYRVVSVLTVLHQDWLNGKE | V18I, R65D, |
| (1:2) | YKCKVSNKALPAPIEKTISKAKGQPREPQVYTLPPSRDELTKNQVSLTC | D87S, T88S, |
| | LVKGFYPSDIAVEWESNGQPENNYKTTPPVLDSDGSFFLYSKLTVDKSR | L101F, |
| | WQQGNVFSCSVMHEALHNHYTQKSLSLSPGGGGGSGGGGSGGGGSPGPV | K104R, K105T |
| | PPSTAVRALIEELINITQNQKAPLCNGSMVWSINLTAGMYCAALESLIN | |
| | VSGCSAIEKTQDMLSGFCPHKVSAGQFSSLHVRSSKIEVAQFVKDLLFH | |
| | LRTLFREGRFN (SEQ ID NO: 186) | |
| MDNA413^{L39/Q111}- | PGPVPPSTAVRALIEELINITQNQKAPLCNGSMVWSINLTAGMYCAALE | L10V, E12A, |
| Fc- | SLINVSGCSAIEKTQDMLSGFCPHKVSAGQFSSLHVRSSKIEVAQFVKD | V18I, R65D, |
| MDNA413^{L39/Q111} | LLFHLRTLFREGQFN [symbol] DKTHTCPPCPAPELLGGPS | D87S, T88S, |
| (2:1:2) | VFLFPPKPKDTLMISRTPEVTCVVVDVSHEDPEVKFNWYVDGVEVHNAK | L101F, |
| | TKPREEQYASTYRVVSVLTVLHQDWLNGKEYKCKVSNKALPAPIEKTIS | K104R, K105T |
| | KAKGQPREPQVYTLPPSRDELTKNQVSLTCLVKGFYPSDIAVEWESNGQ | |
| | PENNYKTTPPVLDSDGSFFLYSKLTVDKSRWQQGNVFSCSVMHEALHNH | |
| | YTQKSLSLSPG [symbol] PGPVPPSTAVRALIEELINITQN | |
| | QKAPLCNGSMVWSINLTAGMYCAALESLINVSGCSAIEKTQDMLSGFCP | |
| | HKVSAGQFSSLHVRSSKIEVAQFVKDLLFHLRTLFREGQFN (SEQ | |
| | ID NO: 187) | |
| H4FEAA-Fc- | APTSSSTKKTQLQLEHLLLDLQMILNGINNYKNPKLTRMLTAKFYMPKK | H4FEAA |
| MDNA413^{L39/Q111} | ATELKHLQCLEEALKPLEEVLNLASSKNFHFTPRDVVSNINVFVLELKG | mutations: |
| (2:1:2) | SETTFMCEYADETATIVEFLNRWITFSQSIISTLTGGGGSGGGGSGGGG | F42A, E62A |
| | SDKTHTCPPCPAPELLGGPSVFLFPPKPKDTLMISRTPEVTCVVVDVSH | Q74S, R81T, |
| | EDPEVKFNWYVDGVEVHNAKTKPREEQYASTYRVVSVLTVLHQDWLNGK | L85V, I92F, |
| | EYKCKVSNKALPAPIEKTISKAKGQPREPQVYTLPPSRDELTKNQVSLT | C125S |
| | CLVKGFYPSDIAVEWESNGQPENNYKTTPPVLDSDGSFFLYSKLTVDKS | MDNA413 |
| | RWQQGNVFSCSVMHEALHNHYTQKSLSLSPGGGGGSGGGGSGGGGSPGP | mutations: |
| | VPPSTAVRALIEELINITQNQKAPLCNGSMVWSINLTAGMYCAALESLI | L10V, E12A, |
| | NVSGCSAIEKTQDMLSGFCPHKVSAGQFSSLHVRSSKIEVAQFVKDLLF | V18I, R65D, |
| | HLRTLFREGQFN (SEQ ID NO: 188) | D87S, T88S, |
| | | L101F, |
| | | K104R, K105T |
| mCD3 IgG- | Gene 1: | L10H, R86T |
| MDNA132^{L39/Q111} | ASTKGPSVFPLAPSSKSTSGGTAALGCLVKDYFPEPVTVSWNSGALTSG | D87G, T88R, |
| (KiH)* | VHTFPAVLQSSGLYSLSSVVTVPSSSLGTQTYICNVNHKPSNTKVDKKV | R108K |
| (*partial | EPKSCDKTHTCPPCPAPELLGGPSVFLFPPKPKDTLMISRTPEVTCVVV | |
| sequence) | DVSHEDPEVKFNWYVDGVEVHNAKTKPREEQYASTYRVVSVLTVLHQDW | |
| | LNGKEYKCKVSNKALPAPIEKTISKAKGQPREPQVYTLPPCRDELTKNQ | |
| | VSLWCLVKGFYPSDIAVEWESNGQPENNYKTTPPVLDSDGSFFLYSKLT | |
| | VDKSRWQQGNVFSCSVMHEALHNHYTQKSLSLSPG [symbol] | |
| | [symbol] PGPVPPSTAHRELIEELVNITQNQKAPLCNGSMVWSINLTAGMYCAAL | |
| | ESLINVSGCSAIEKTQRMLSGFCPHKVSAGQFSSLHVTGRKIEVAQFVK | |
| | DLLLHLKKLFKEGQFN (SEQ ID NO: 189) | |
| | Gene 2: | |
| | ASTKGPSVFPLAPSSKSTSGGTAALGCLVKDYFPEPVTVSWNSGALTSG | |
| | VHTFPAVLQSSGLYSLSSVVTVPSSSLGTQTYICNVNHKPSNTKVDKKV | |
| | EPKSCDKTHTCPPCPAPELLGGPSVFLFPPKPKDTLMISRTPEVTCVVV | |
| | DVSHEDPEVKFNWYVDGVEVHNAKTKPREEQYASTYRVVSVLTVLHQDW | |
| | LNGKEYKCKVSNKALPAPIEKTISKAKGQPREPQVCTLPPSRDELTKNQ | |
| | VSLSCAVKGFYPSDIAVEWESNGQPENNYKTTPPVLDSDGSFFLVSKLT | |
| | VDKSRWQQGNVFSCSVMHEALHNHYTQKSLSLSPGK (SEQ ID | |
| | NO: 190) | |
| | Gene 3: | |
| | RTVAAPSVFIFPPSDEQLKSGTASVVCLLNNFYPREAKVQWKVDNALQS | |
| | GNSQESVTEQDSKDSTYSLSSTLTLSKADYEKHKVYACEVTHQGLSSPV | |
| | TKSFNRGEC (SEQ ID NO: 191) | |
| huCD3 IgG- | Gene 1: | L10H, R86T, |
| MDNA132^{L39/Q111} | ASTKGPSVFPLAPSSKSTSGGTAALGCLVKDYFPEPVTVSWNSGALTSG | D87G, T88R, |
| (KiH)* | VHTFPAVLQSSGLYSLSSVVTVPSSSLGTQTYICNVNHKPSNTKVDKKV | R108K |
| (*partial | EPKSCDKTHTCPPCPAPELLGGPSVFLFPPKPKDTLMISRTPEVTCVVV | |
| sequence) | DVSHEDPEVKFNWYVDGVEVHNAKTKPREEQYASTYRVVSVLTVLHQDW | |
| | LNGKEYKCKVSNKALPAPIEKTISKAKGQPREPQVYTLPPCRDELTKNQ | |
| | VSLWCLVKGFYPSDIAVEWESNGQPENNYKTTPPVLDSDGSFFLYSKLT | |
| | VDKSRWQQGNVFSCSVMHEALHNHYTQKSLSLSP [symbol] | |
| | [symbol] PGPVPPSTAHRELIEELVNITQNQKAPLCNGSMVWSINLTAGMYCAAL | |
| | ESLINVSGCSAIEKTQRMLSGFCPHKVSAGQFSSLHVTGRKIEVAQFVK | |
| | DLLLHLKKLFKEGQFN (SEQ ID NO: 192) | |
| | Gene 2: | |
| | ASTKGPSVFPLAPSSKSTSGGTAALGCLVKDYFPEPVTVSWNSGALTSG | |
| | VHTFPAVLQSSGLYSLSSVVTVPSSSLGTQTYICNVNHKPSNTKVDKKV | |
| | EPKSCDKTHTCPPCPAPELLGGPSVFLFPPKPKDTLMISRTPEVTCVVV | |
| | DVSHEDPEVKFNWYVDGVEVHNAKTKPREEQYASTYRVVSVLTVLHQDW | |
| | LNGKEYKCKVSNKALPAPIEKTISKAKGQPREPQVCTLPPSRDELTKNQ | |
| | VSLSCAVKGFYPSDIAVEWESNGQPENNYKTTPPVLDSDGSFFLVSKLT | |
| | VDKSRWQQGNVFSCSVMHEALHNHYTQKSLSLSPGK (SEQ ID | |
| | NO: 193) | |
| | Gene 3: | |
| | RTVAAPSVFIFPPSDEQLKSGTASVVCLLNNFYPREAKVQWKVDNALQS | |
| | GNSQESVTEQDSKDSTYSLSSTLTLSKADYEKHKVYACEVTHQGLSSPV | |
| | TKSFNRGEC (SEQ ID NO: 194) | |
| mPD1 IgG- | Gene 1: | L10H, R86T, |
| MDNA132^{L39/Q111} | ASTKGPSVFPLAPSSKSTSGGTAALGCLVKDYFPEPVTVSWNSGALTSG | D87G, T88R, |
| (KiH)* | VHTFPAVLQSSGLYSLSSVVTVPSSSLGTQTYICNVNHKPSNTKVDKKV | R108K |
| (*partial | EPKSCDKTHTCPPCPAPELLGGPSVFLFPPKPKDTLMISRTPEVTCVVV | |
| sequence) | DVSHEDPEVKFNWYVDGVEVHNAKTKPREEQYASTYRVVSVLTVLHQDW | |
| | LNGKEYKCKVSNKALPAPIEKTISKAKGQPREPQVYTLPPCRDELTKNQ | |
| | VSLWCLVKGFYPSDIAVEWESNGQPENNYKTTPPVLDSDGSFFLYSKLT | |
| | VDKSRWQQGNVFSCSVMHEALHNHYTQKSLSLSPG [symbol] | |
| | [symbol] PGPVPPSTAHRELIEELVNITQNQKAPLCNGSMVWSINLTAGMYCAAL | |
| | ESLINVSGCSAIEKTQRMLSGFCPHKVSAGQFSSLHVTGRKIEVAQFVK | |
| | DLLLHLKKLFKEGQFN (SEQ ID NO: 195) | |
| | Gene 2: | |
| | ASTKGPSVFPLAPSSKSTSGGTAALGCLVKDYFPEPVTVSWNSGALTSG | |
| | VHTFPAVLQSSGLYSLSSVVTVPSSSLGTQTYICNVNHKPSNTKVDKKV | |
| | EPKSCDKTHTCPPCPAPELLGGPSVFLFPPKPKDTLMISRTPEVTCVVV | |
| | DVSHEDPEVKFNWYVDGVEVHNAKTKPREEQYASTYRVVSVLTVLHQDW | |
| | LNGKEYKCKVSNKALPAPIEKTISKAKGQPREPQVCTLPPSRDELTKNQ | |
| | VSLSCAVKGFYPSDIAVEWESNGQPENNYKTTPPVLDSDGSFFLVSKLT | |
| | VDKSRWQQGNVFSCSVMHEALHNHYTQKSLSLSPGK (SEQ ID | |
| | NO: 196) | |
| | Gene 3: | |
| | RTVAAPSVFIFPPSDEQLKSGTASVVCLLNNFYPREAKVQWKVDNALQS | |
| | GNSQESVTEQDSKDSTYSLSSTLTLSKADYEKHKVYACEVTHQGLSSPV | |
| | TKSFNRGEC SEQ ID NO: 197) | |
| huPD1 IgG- | Gene 1: | L10H, R86T, |
| MDNA132^{L39/Q111} | ASTKGPSVFPLAPSSKSTSGGTAALGCLVKDYFPEPVTVSWNSGALTSG | D87G, T88R, |
| (KiH)* | VHTFPAVLQSSGLYSLSSVVTVPSSSLGTQTYICNVNHKPSNTKVDKKV | R108K |
| (*partial | EPKSCDKTHTCPPCPAPELLGGPSVFLFPPKPKDTLMISRTPEVTCVVV | |
| sequence) | DVSHEDPEVKFNWYVDGVEVHNAKTKPREEQYASTYRVVSVLTVLHQDW | |
| | LNGKEYKCKVSNKALPAPIEKTISKAKGQPREPQVYTLPPCRDELTKNQ | |
| | VSLWCLVKGFYPSDIAVEWESNGQPENNYKTTPPVLDSDGSFFLYSKLT | |
| | VDKSRWQQGNVFSCSVMHEALHNHYTQKSLSLSPG [symbol] | |
| | [symbol] PGPVPPSTAHRELIEELVNITQNQKAPLCNGSMVWSINLTAGMYCAAL | |
| | ESLINVSGCSAIEKTQRMLSGFCPHKVSAGQFSSLHVTGRKIEVAQFVK | |
| | DLLLHLKKLFKEGQFN (SEQ ID NO: 198) | |
| | Gene 2: | |
| | ASTKGPSVFPLAPSSKSTSGGTAALGCLVKDYFPEPVTVSWNSGALTSG | |
| | VHTFPAVLQSSGLYSLSSVVTVPSSSLGTQTYICNVNHKPSNTKVDKKV | |
| | EPKSCDKTHTCPPCPAPELLGGPSVFLFPPKPKDTLMISRTPEVTCVVV | |
| | DVSHEDPEVKFNWYVDGVEVHNAKTKPREEQYASTYRVVSVLTVLHQDW | |
| | LNGKEYKCKVSNKALPAPIEKTISKAKGQPREPQVCTLPPSRDELTKNQ | |
| | VSLSCAVKGFYPSDIAVEWESNGQPENNYKTTPPVLDSDGSFFLVSKLT | |
| | VDKSRWQQGNVFSCSVMHEALHNHYTQKSLSLSPGK (SEQ ID | |
| | NO: 199) | |
| | Gene 3: | |
| | RTVAAPSVFIFPPSDEQLKSGTASVVCLLNNFYPREAKVQWKVDNALQS | |
| | GNSQESVTEQDSKDSTYSLSSTLTLSKADYEKHKVYACEVTHQGLSSPV | |
| | TKSFNRGEC (SEQ ID NO: 200) | |
| mPD1 IgG- | Gene 1: | F42A, E62A, |
| MDNA109FEAA^{S125} | ASTKGPSVFPLAPSSKSTSGGTAALGCLVKDYFPEPVTVSWNSGALTSG | L80F, R81D, |
| (KiH)* | VHTFPAVLQSSGLYSLSSVVTVPSSSLGTQTYICNVNHKPSNTKVDKKV | L85V, I86V, |
| (*partial | EPKSCDKTHTCPPCPAPELLGGPSVFLFPPKPKDTLMISRTPEVTCVVV | I92F, C125S |
| sequence) | DVSHEDPEVKFNWYVDGVEVHNAKTKPREEQYASTYRVVSVLTVLHQDW | |
| | LNGKEYKCKVSNKALPAPIEKTISKAKGQPREPQVYTLPPCRDELTKNQ | |
| | VSLWCLVKGFYPSDIAVEWESNGQPENNYKTTPPVLDSDGSFFLYSKLT | |
| | VDKSRWQQGNVFSCSVMHEALHNHYTQKSLSLSPG [symbol] | |
| | [symbol] APTSSSTKKTQLQLEHLLLDLQMILNGINNYKNPKLTRMLTAKFYMPK | |
| | KATELKHLQCLEEALKPLEEVLNLAQSKNFHFDPRDVVSNINVFVLELK | |
| | GSETTFMCEYADETATIVEFLNRWITFSQSIISTLT (SEQ ID | |
| | NO: 201) | |
| | Gene 2: | |
| | ASTKGPSVFPLAPSSKSTSGGTAALGCLVKDYFPEPVTVSWNSGALTSG | |
| | VHTFPAVLQSSGLYSLSSVVTVPSSSLGTQTYICNVNHKPSNTKVDKKV | |
| | EPKSCDKTHTCPPCPAPELLGGPSVFLFPPKPKDTLMISRTPEVTCVVV | |
| | DVSHEDPEVKFNWYVDGVEVHNAKTKPREEQYASTYRVVSVLTVLHQDW | |
| | LNGKEYKCKVSNKALPAPIEKTISKAKGQPREPQVCTLPPSRDELTKNQ | |
| | VSLSCAVKGFYPSDIAVEWESNGQPENNYKTTPPVLDSDGSFFLVSKLT | |
| | VDKSRWQQGNVFSCSVMHEALHNHYTQKSLSLSPGK (SEQ ID | |
| | NO: 202) | |
| | Gene 3: | |
| | RTVAAPSVFIFPPSDEQLKSGTASVVCLLNNFYPREAKVQWKVDNALQS | |
| | GNSQESVTEQDSKDSTYSLSSTLTLSKADYEKHKVYACEVTHQGLSSPV | |
| | TKSFNRGEC (SEQ ID NO: 203) | |
| huPD1 IgG- | Gene 1: | F42A, E62A, |
| MDNA109FEAA^{S125} | ASTKGPSVFPLAPSSKSTSGGTAALGCLVKDYFPEPVTVSWNSGALTSG | L80F, R81D, |
| (KiH)* | VHTFPAVLQSSGLYSLSSVVTVPSSSLGTQTYICNVNHKPSNTKVDKKV | L85V, I86V, |
| (*partial | EPKSCDKTHTCPPCPAPELLGGPSVFLFPPKPKDTLMISRTPEVTCVVV | I92F, C125S |
| sequence) | DVSHEDPEVKFNWYVDGVEVHNAKTKPREEQYASTYRVVSVLTVLHQDW | |
| | LNGKEYKCKVSNKALPAPIEKTISKAKGQPREPQVYTLPPCRDELTKNQ | |
| | VSLWCLVKGFYPSDIAVEWESNGQPENNYKTTPPVLDSDGSFFLYSKLT | |
| | VDKSRWQQGNVFSCSVMHEALHNHYTQKSLSLSPG [symbol] | |
| | [symbol] APTSSSTKKTQLQLEHLLLDLQMILNGINNYKNPKLTRMLTAKFYMPK | |
| | KATELKHLQCLEEALKPLEEVLNLAQSKNFHFDPRDVVSNINVFVLELK | |
| | GSETTFMCEYADETATIVEFLNRWITFSQSIISTLT (SEQ ID | |
| | NO: 204) | |
| | Gene 2: | |
| | ASTKGPSVFPLAPSSKSTSGGTAALGCLVKDYFPEPVTVSWNSGALTSG | |
| | VHTFPAVLQSSGLYSLSSVVTVPSSSLGTQTYICNVNHKPSNTKVDKKV | |
| | EPKSCDKTHTCPPCPAPELLGGPSVFLFPPKPKDTLMISRTPEVTCVVV | |
| | DVSHEDPEVKFNWYVDGVEVHNAKTKPREEQYASTYRVVSVLTVLHQDW | |
| | LNGKEYKCKVSNKALPAPIEKTISKAKGQPREPQVCTLPPSRDELTKNQ | |
| | VSLSCAVKGFYPSDIAVEWESNGQPENNYKTTPPVLDSDGSFFLVSKLT | |
| | VDKSRWQQGNVFSCSVMHEALHNHYTQKSLSLSPGK (SEQ ID | |
| | NO: 205) | |
| | Gene 3: | |
| | RTVAAPSVFIFPPSDEQLKSGTASVVCLLNNFYPREAKVQWKVDNALQS | |
| | GNSQESVTEQDSKDSTYSLSSTLTLSKADYEKHKVYACEVTHQGLSSPV | |
| | TKSFNRGEC (SEQ ID NO: 206) | |
| mPD1 IgG- | Gene 1: | L10V, E12A, |
| MDNA413^{R39/Q111}* | ASTKGPSVFPLAPSSKSTSGGTAALGCLVKDYFPEPVTVSWNSGALTSG | L39R, V18I, |
| (*partial | VHTFPAVLQSSGLYSLSSVVTVPSSSLGTQTYICNVNHKPSNTKVDKKV | R65D, D87S, |
| sequence) | EPKSCDKTHTCPPCPAPELLGGPSVFLFPPKPKDTLMISRTPEVTCVVV | T88S, L101F, |
| | DVSHEDPEVKFNWYVDGVEVHNAKTKPREEQYASTYRVVSVLTVLHQDW | K104R, K105T |
| | LNGKEYKCKVSNKALPAPIEKTISKAKGQPREPQVYTLPPSRDELTKNQ | |
| | VSLTCLVKGFYPSDIAVEWESNGQPENNYKTTPPVLDSDGSFFLYSKLT | |
| | VDKSRWQQGNVFSCSVMHEALHNHYTQKSLSLSPGK [symbol] | |
| | [symbol] PGPVPPSTAVRALIEELINITQNQKAPLCNGSMVWSINRTAGMYCAA | |
| | LESLINVSGCSAIEKTQDMLSGFCPHKVSAGQFSSLHVRSSKIEVAQFV | |
| | KDLLFHLRTLFREGQFN (SEQ ID NO: 207) | |
| | Gene 3: | |
| | RTVAAPSVFIFPPSDEQLKSGTASVVCLLNNFYPREAKVQWKVDNALQS | |
| | GNSQESVTEQDSKDSTYSLSSTLTLSKADYEKHKVYACEVTHQGLSSPV | |
| | TKSFNRGEC (SEQ ID NO: 208) | |
| huPD1 IgG- | Gene 1: | L10V, E12A, |
| MDNA413^{R39/Q111}* | ASTKGPSVFPLAPSSKSTSGGTAALGCLVKDYFPEPVTVSWNSGALTSG | L39R, V18I, |
| (*partial | VHTFPAVLQSSGLYSLSSVVTVPSSSLGTQTYICNVNHKPSNTKVDKKV | R65D, D87S, |
| sequence) | EPKSCDKTHTCPPCPAPELLGGPSVFLFPPKPKDTLMISRTPEVTCVVV | T88S, L101F, |
| | DVSHEDPEVKFNWYVDGVEVHNAKTKPREEQYASTYRVVSVLTVLHQDW | K104R, K105T |
| | LNGKEYKCKVSNKALPAPIEKTISKAKGQPREPQVYTLPPSRDELTKNQ | |
| | VSLTCLVKGFYPSDIAVEWESNGQPENNYKTTPPVLDSDGSFFLYSKLT | |
| | VDKSRWQQGNVFSCSVMHEALHNHYTQKSLSLSPGK [symbol] | |
| | [symbol] PGPVPPSTAVRALIEELINITQNQKAPLCNGSMVWSINRTAGMYCAA | |
| | LESLINVSGCSAIEKTQDMLSGFCPHKVSAGQFSSLHVRSSKIEVAQFV | |
| | KDLLFHLRTLFREGQFN (SEQ ID NO: 209) | |
| | Gene 3: | |
| | RTVAAPSVFIFPPSDEQLKSGTASVVCLLNNFYPREAKVQWKVDNALQS | |
| | GNSQESVTEQDSKDSTYSLSSTLTLSKADYEKHKVYACEVTHQGLSSPV | |
| | TKSFNRGEC (SEQ ID NO: 210) | |
| MDNA413^{R39/Q111}- | Gene 1: | L10V, E12A, |
| Fc | PGPVPPSTAVRALIEELINITQNQKAPLCNGSMVWSINRTAGMYCAALE | V18I, L39R, |
| (1:1 KIH) | SLINVSGCSAIEKTQDMLSGFCPHKVSAGQFSSLHVRSSKIEVAQFVKD | R65D, D87S, |
| | LLFHLRTLFREGQFN [symbol] DKTHTCPPCPAPELLGGPS | T88S, L101F, |
| | VFLFPPKPKDTLMISRTPEVTCVVVDVSHEDPEVKFNWYVDGVEVHNAK | K104R, K105T |
| | TKPREEQYASTYRVVSVLTVLHQDWLNGKEYKCKVSNKALPAPIEKTIS | |
| | KAKGQPREPQVYTLPPSRDELTKNQVSLTCLVKGFYPSDIAVEWESNGQ | |
| | PENNYKTTPPVLDSDGSFFLYSKLTVDKSRWQQGNVFSCSVMHEALHNH | |
| | YTQKSLSLSPG (SEQ ID NO: 211) | |
| | Gene 2: | |
| | DKTHTCPPCPAPELLGGPSVFLFPPKPKDTLMISRTPEVTCVVVDVSHE | |
| | DPEVKFNWYVDGVEVHNAKTKPREEQYASTYRVVSVLTVLHQDWLNGKE | |
| | YKCKVSNKALPAPIEKTISKAKGQPREPQVCTLPPSRDELTKNQVSLSC | |
| | AVKGFYPSDIAVEWESNGQPENNYKTTPPVLDSDGSFFLVSKLTVDKSR | |
| | WQQGNVFSCSVMHEALHNHYTQKSLSLSPG (SEQ ID NO: 212) | |

### Example 7: Assays Using Bispecific Fusion Constructs

### HEK Blue IL2 Assay

[0617] HEK-Blue IL2 reporter cells were purchased from InvivoGen and the studies were done at MDS, San Diego, USA. The kit contained all necessary contents for execution. Cells were expanded as per the manufacturer's instructions. An assay was performed with control compounds to show proof of principle and establish dose response ranges previously. Subsequently, assays were run to test the potency of the Bispecific constructs harboring IL-2 agonists in the HEK Blue IL-2 pSTAT5 reporter system.

[0618] HEK-Blue IL2 reporter cells were plated at 50,000 cells per well in the test medium per the manufacturer's instructions and treated with the constructs noted in Table 29 and at the concentrations noted for 24 hours. After incubation, the cell supernatant (20 μL) was removed to a new plate and then 180 μL of QUANTI-Blue solution was added and incubated for 2 hours at 37° C. Plates were scanned on a conventional plate reader for absorbance at 650 nm.

[0619] MDNA109FEAA^{C125}-Fc-MDNA413^{R39/Q111}(2:1:2), MDNA132^{L39/Q111}-Fc-MDNA109^{C125} (1:1 KIH), MDNA413^{R39/Q111}-Fc-MDNA109^{C125} (1:1:1 KIH) and H4FEAA-Fc-MDNA413^{L39/Q111} (2:1:2) with rhIL2 (11979-828879, LP) and MDNA19 (MDNA019FEAA-Fc) were used as experimental control. All the molecules except H4FEAA-Fc-MDNA413^{L39/Q111} (2:1:2) were observed to have EC₅₀s that were 1.4-1.8 fold lower than rhIL2 (11979-828879, LP) indicating that they are more potent than rhIL2 (11979-828879, LP) in inducing pSTAT5 in the HEK Blue IL2 reporter system (FIG. 47).

TABLE 29
The compiled EC50s of the constructs are listed below:

| Construct | EC50 (pM) |
|---|---|
| MDNA132^{L39/Q111}-Fc-MDNA109^{C125}(1:1:1 KIH) | 2.3 |
| MDNA109FEAA^{C125}-Fc-MDNA413^{R39/Q111} | 2.3 |
| MDNA413^{R39/Q111}-Fc-MDNA109^{C125} (1:1:1 KIH) | 2.8 |
| H4FEAA-Fc-MDNA413^{L39/Q111} (2:1:2) | 179.4 |
| Human anti-PD1-IgG-MDNA109FEAA^{S125} | 3.8 |
| Mouse anti-PD1-IgG-MDNA109FEAA^{S125} | 2.3 |

### CTTL-2 Assay

[0620] CTLL2 cells were plated into 96 well plates at 30,000 cells per well in media lacking the TSTIM proliferation supplement. Following plating, cells were treated increasing concentrations of the constructs listed in Table 30 below for 48 hours. As a comparator of activity, each plate also contained MDNA11 (TP28767F). After treatment, Cell Titer Blue viability reagent (Promega G8080) was added to each well and the plates were scanned after 3-6 hours at 560Ex/590Em for development of the fluorescent viability signal. Six plates were run for the assay, which each plate containing serial dilutions of the MDNA11 comparator and 2 test constructs run in duplicate wells.

[0621] Of the constructs tested for their ability to induce the proliferation of CTTL-2 assay, MDNA109FEAA^{C125}-Fc-MDNA413^{R39/Q111} (2:1:2), MDNA132^{L39/Q111}-Fc-MDNA109^{C125}(1:1:1 KIH), MDNA413^{R39/Q111}-Fc-MDNA109^{C125} (1:1:1 KIH) and H4FEAA-Fc-MDNA413^{L39/Q111} (2:1:2) with rhIL2 (11979-828879, LP) and MDNA11 as experimental control, MDNA413^{R39/Q111}-Fc-MDNA109^{C125} (1:1:1 KIH) and MDNA132^{L39/Q111}-Fc-MDNA109^{C125} (1:1:1 KIH) had similar relative potencies. (47 times and 38 times MDNA11 respectively); MDNA19 (MDNA019FEAA-Fc) and MDNA109FEAA^{C125}-Fc-MDNA413^{R39/Q111} (2:1:2) had similar relative potencies to each other (2.89 and 2.63 times MNDA11 respectively) and were ˜ 1.5 log less active than rhIL2. The lowest potency observed was with H4FEAA-Fc-MDNA413^{L39/Q111} (2:1:2) which was ˜2% of the MDNA11 potency and ˜1600 times less active than rhIL2 (FIG. 48).

TABLE 30
The compiled list of EC50s of the constructs is listed below:

| Construct | EC50 (pM) |
|---|---|
| MDNA132^{L39/Q111}-Fc-MDNA109^{C125}(1:1:1 KIH) | 9.5 |
| MDNA109FEAA^{C125}-Fc-MDNA413^{R39/Q111} | 154 |
| MDNA413^{R39/Q111}-Fc-MDNA109^{C125} (1:1:1 KIH) | 8.5 |
| H4FEAA-Fc-MDNA413^{L39/Q111} (2:1:2) | 20900 |

### HEK Blue IL4/IL3

[0622] HEK-Blue IL4/IL13 reporter cells were purchased from InvivoGen and the studies were done at MDS, San Diego, USA. The kit contained all necessary contents for execution. Cells were expanded as per the manufacturer's instructions. An assay was performed with control compounds to show proof of principle and establish dose response ranges previously. Subsequently, assays were run to test the potency of the MDNA413 variants in the HEK Blue IL-4/IL-13 pSTAT6 reporter system.

### HEK Blue IL4

[0623] For IL-4 competitive assay, HEK-Blue IL-4/IL-13 reporter cells (Invivogen) were plated at 50,000 cells per well in the test medium per the manufacturer's instructions and treated with increasing concentrations of hIL4 (R&D Systems 204-IL-010/CF) for 24 hours (standard curve from 0.2 nM down to 0.0002 nM hIL4 serially diluted ˜0.5 log intervals). In addition, wells containing hIL4 (at 0.1 nM), were treated with increasing concentrations of the test samples listed in Table 30 (150 nM down to 0.15 nM by 0.5 log intervals). Each standard or test sample serial dilution was assayed in duplicate wells. A total of 4 plates were run in the assay. After incubation, the cell supernatants (20 μL) were removed to a new plate and then 180 of QUANTI-Blue solution was added and incubated for 2 hours at 37 C. Plates were scanned on a conventional plate reader for absorbance at 650 nm (FIG. 49).

### HEK Blue IL13

[0624] For the IL-13 competitive assay, HEK-Blue IL-4/IL-13 reporter cells (Invivogen) were plated at 50,000 cells per well in the test medium per the manufacturer's instructions and treated with increasing concentrations of hIL13 (R&D Systems 213-ILB-005/CF) for 24 hours (standard curve from 8 nM down to 0.033 nM hIL13 serially diluted by a factor of 2.5×). In addition, wells containing hIL13 (at 0.8 nM, 10 ng/mL), were treated with increasing concentrations of the test samples listed in Table 30 (150 nM down to 0.11 nM by a factor of 3.33×). Each standard or test sample serial dilution was assayed in duplicate wells. A total of 4 plates were run in the assay. After incubation, the cell supernatants (20 μL) were removed to a new plate and then 180 of QUANTI-Blue solution was added and incubated for 24 hours at 37° C. Plates were scanned on a conventional plate reader for absorbance at 650 nm (FIG. 50).

[0625] The data obtained from screening of constructs for their ability to inhibit the IL13 induced pSTAT6 activation in the HEK Blue IL13 reporter system establishes: (1) the leucine, L at 39 position seem to make the molecule less potent than arginine, R at the same position; and (2) the MDNA413 at the C-terminus of Fc seems to be more potent than MDNA413 at the N-terminus of Fc. Also, the EC₅₀s obtained from the assay could enable the rank ordering of molecules with respect to functional in vitro potency as below:

TABLE 31
EC50 rank ordering

| | IL 13 | IL4 |
|---|---|---|
| Construct | EC50 (nM) | EC50 (nM) |
| MDNA109FEAA^{C125}-Fc-MDNA413^{R39/Q111} | 12.3 | 8.05 |
| (2:1:2) | | |
| Fc4-MDNA413^{R39/Q111} (1:2) | 37.8 | 7.5 |
| Fc-MDNA413^{R39/Q111} (1:2) | 39.0 | 26.48 |
| huPD1 IgG-MDNA413^{R39/Q111} (1:2) | 57.9 | 34.18 |
| MDNA413^{R39/Q111}-Fc (1:1 KIH) | 138.7 | 96.75 |
| mPD1 IgG-MDNA413^{R39/Q111} (1:2) | 148.5 | 86.4 |
| MDNA413^{R39/Q111}-Fc-MDNA109 (1:1:1 | 203.0 | 92.17 |
| KIH) | | |
| Fc-MDNA413^{L39/Q111}(1:2) | 268.0 | 211.6 |
| Fc-MDNA413^{L39/R111} (1:2) | 270.0 | 150.5 |
| MDNA413^{L39/Q111}-Fc-MDNA413^{L39/Q111} | 600.8 | 326.2 |
| (2:1:2) | | |
| MDNA413^{R39/Q111}-Fc-MDNA132^{L39/Q111} | 890.8 | 852.3 |
| (2:1:1) | | |
| H4FEAA-Fc-MDNA413^{L39/Q111} (2:1:2) | 1119.0 | No Inhibition |

### TF-1 Assay

[0626] TF-1 cells were cultured in RPMI media (ATCC) supplemented with 10% FBS (Gibco) and 2 ng/mL GM-CSF (ThermoFisher). TF-1 cells were harvest and washed twice with PBS before being placed into media lacking GM-CSF. Cells were added at 30,000 cells per well on the day of the experiment in a volume of 100 μL. To perform the antagonist assay, the TF-1 proliferation assay, as outlined above, was setup using rhIL13 EC50 or EC80 in the proliferation assay. Reactions were also supplemented with increasing concentrations of the anti-IL13Rα1 antibody or constructs. Controls included in the plate consisted of 1) cells grown in complete media, 2) cells grown in un-supplemented media (no IL13 or GM-CSF), 3) cells supplemented with EC50 or EC80 rhIL13, and cells treated with an IL13 standard curve. Triplicate wells were treated under each condition. Cells were incubated for 96 hours and developed with CyQUANT. For development a 3× solution of the CyQUANT assay reagent was prepared according the manufacturer's instructions and 100 μL of this solution was added to each well. Plates were incubated for 1 hour at 37° C., mixed and then centrifuged to settle the cells. Plates were read at 485Ex/535Em.

[0627] All constructs showed dose dependent inhibition of TF-1 proliferation with MDNA019FEAA^{C125}-Fc-MDNA413^{R39/Q111} (2:1:2) showing maximum inhibition while Fc-MDNA413^{L39/Q111} showing the least. MDNA019FEAA^{C125}-Fc-MDNA413^{R39/Q111} (2:1:2) showed inhibition of TF-1 proliferation at both EC50 and EC80 of rhIL13 whereas, Fc-MDNA413^{L39/Q111} (1:2) and Fc-MDNA413^{L39/R111} (1:2) showed significant inhibition at only EC50 (FIG. 51).

[0628] TF-1 cells were harvest and washed twice with PBS before being placed into media lacking GM-CSF. Cells were added at 30,000 cells per well on the day of the experiment in a volume of 100 μL. To perform the antagonist assay, the TF-1 proliferation assay was setup using rhIL13 EC80 in the proliferation assay.

[0629] MDNA109FEAA^{C125}-Fc-MDNA413^{R39/Q111} showed dose dependent inhibition of TF-1 proliferation with an IC50 of 37 nM (FIG. 71).

pSTAT5 Assay in Human PBMCs

[0630] PBMCs were isolated over a density gradient, allowed to rest in complete media, and then stimulated for 15 minutes with IL2, MDNA109FEAA-Fc or MDNA109FEAA^{C125}-Fc-MDNA413^{R39/Q111}. Controls included non-stimulated PBMC cells. Cells were fixed immediately following stimulation, and samples analyzed by flow cytometry after intracellular staining for phosphorylated STAT5 (P-STAT5) in the immune subsets, Naïve CD8 T cells (CD8+CD25−), NK cells and Tregs (FIG. 52).

[0631] MDNA109FEAA^{C125}-Fc-MDNA413^{R39/Q111} human anti-PD1-MDNA109FEAA^{S125} mouse anti-PD1-MDNA109FEAA^{S125} are able to activate signaling in naïve CD8 T cells and NK cells with a higher potency than rhIL-2. However, the potency is greatly reduced for pSTAT5 signaling in Tregs in comparison to rhIL-2. These data show that MDNA109FEAA^{C125}-Fc-MDNA413^{R39/Q111} human anti-PD1-MDNA109FEAA^{S125}, mouse anti-PD1-MDNA109FEAA^{S125} are superior to rhIL-2 at activating immune effectors cell response required for achieve anti-cancer efficacy. The construct H4FEAA-Fc-MDNA413^{L39/Q111} (2:1:2) is not potent though in inducing pSTAT5 induction in human PBMCs.

### SPR Study

[0632] Human IgG (Fc) Capture Chip principle: (1) Immobilization: Immobilized Anti-Human IgG (Fc) antibody on CM5 chip; (2) Capture: capture the IL-13 Protein, Fc Tag or sample; (3) Analyte: the analyte is Human IL-13 R alpha 1 Protein or Human IL-13 R alpha 2 Protein; and (4) Regeneration: 3 M magnesium chloride (FIG. 53).

[0633] The binding to IL13Rα1 and IL13Rα2 is shown in FIG. 72 and Table 32.

TABLE 32
Binding affinity K_{D} values of the molecules for IL13Ra1 and IL13Ra2

| | IL13Ra1, K_{D} (nM) | IL13Ra2, K_{D} (nM) |
|---|---|---|
| Human anti-PD1- | No binding | 1.4 |
| MDNA132^{L39/Q111} (1:1 KIH) | | |
| Mouse anti-PD1- | No binding | 1.56 |
| MDNA132^{L39/Q111}(1:1 KIH) | | |

[0634] The binding to CD3 epitopes, CD3epsilon/delta is shown in FIG. 73 and Table 33. The results showed that human and mouse anti-CD3-MDNA132 bind to human and mouse CD3 epitopes respectively with no cross reactivity.

TABLE 33
Binding affinity K_{D} values of the molecules for CD3 epitopes

| | Human CD3 epsilon delta | Mouse CD3 epsilon delta |
|---|---|---|
| | heterodimer, K_{D} (nM) | heterodimer, K_{D} (nM) |
| Human anti-CD3- | 1530 | No binding |
| MDNA132^{L39/Q111} | | |
| (1:1 KIH) | | |
| Mouse anti-CD3- | No binding | 50.9 |
| MDNA132^{L39/Q111} | | |
| (1:1 KIH) | | |

[0635] The binding to IL2R alpha (CD25) and beta (CD122) is shown in FIG. 74 and Table 34.

TABLE 34
Binding affinity K_{D} values of the molecules for IL2Rα and IL2Rβ

| | IL2Rα, K_{D} (nM) | IL2Rβ, K_{D} (nM) |
|---|---|---|
| MDNA109FEAAC¹²⁵-Fc- | No binding | 9.3 |
| MDNA413^{R39/Q111} (2:1:2) | | |
| Mouse anti-PD1-MDNA109FEAA^{S125} | No binding | 11.3 |
| (1:1 KIH) | | |

[0636] The binding to PD1 is shown in FIG. 75 and Table 35.

TABLE 35
Binding affinity KD values of the molecules for PD1

| | Human PD1 | Mouse PD1 |
|---|---|---|
| | (nM) | (nM) |
| Human anti-PD1-MDNA132^{L39/Q111} (1:1 | 4.36 | No binding |
| KIH) | | |
| Mouse anti-PD1-MDNA132^{L39/Q111} (1:1 | No binding | 41.4 |
| KIH) | | |
| Human anti-PD1-MDNA413^{R39/Q111} (1:2) | 4.89 | No binding |
| Mouse anti-PD1-MDNA109FEAA^{S125} | No binding | 102 |
| (1:1 KIH) | | |

### Example 8: Inhibition of IL-4 and IL-13 Induced M2 Polarization

[0637] Experimental Protocol:
[0638] PBMCs were isolated from whole blood.
[0639] CD14+ monocytes were separated using magnetic selection and differentiated into M0 macrophage in the presence of AB serum over 6 days using M-CSF.
[0640] On day 6, macrophages were polarised towards M2 using the EC80 value of either IL-13 or IL-4 in the presence of a reference or test antagonist (10 point 3-fold dilution).
[0641] Following treatment, macrophages were collected for phenotyping by flow cytometry, with Fc receptors blocked prior to antibody staining.

[0642] The inhibition of IL-4 induced M2 polarization is shown in FIG. 76 and Table 36.

[0643] FIG. 76A shows phenotyping of IL-4 treated macrophages in the presence of Fc-MDNA413^{R39/Q111}(1:2); FIG. 76B shows phenotyping of IL-4 treated macrophages in the presence of Fc4-MDNA413^{R39/Q111}(1:2); FIG. 76C shows phenotyping of IL-4 treated macrophages in the presence of MDNA109FEAA^{C125}-Fc-MDNA413^{R39/Q111}(2:1:2); FIG. 76D shows phenotyping of IL-4 treated macrophages in the presence of hu anti-PD1-MDNA413^{R39/Q111}(1:2); and FIG. 76E shows phenotyping of IL-4 treated macrophages in the presence of mouse anti-PD1-MDNA413^{R39/Q111}(1:2). In each case, dotted lines represent: IL-4 only control, dashed lines represent: M0 control.

TABLE 36
Inhibition of IL-4 Mediated M2 Polarization (IC50 values from 2 donors
separated by comma)

| | IL-4 Mediated M2 | IL-4 Mediated M2 |
|---|---|---|
| | polarization | polarization |
| Construct | CD206 (IC50 nM) | CD209 (IC50 nM) |
| Fc-MDNA413^{R39/Q111} (1:2) | ND, 1.7 | <0.01, 3.28 |
| Fc4-MDNA413^{R39/Q111}(1:2) | ND, 2.01 | 0.59, 2.3 |
| MDNA109FEAAC125-Fc- | 3.8, 3.1 | 6.3, 4.2 |
| MDNA413^{R39/Q111}(2:1:2) | | |
| Human anti-PD1- | 2.0, 6.2 | 7.6, 5.2 |
| MDNA413^{R39/Q111}(1:2) | | |
| Mouse anti-PD1- | 4.5, 5.97 | 7.29, 5.37 |
| MDNA413^{R39/Q111}(1:2) | | |

[0644] The inhibition of IL-13 induced M2 polarization is shown in FIG. 77 and Table 37.

[0645] FIG. 77A shows phenotyping of IL-13 treated macrophages in the presence of Fc-MDNA413^{R39/Q111} (1:2); FIG. 77B shows phenotyping of IL-13 treated macrophages in the presence of Fc4-MDNA413^{R39/Q111}(1:2); FIG. 77C shows phenotyping of IL-13 treated macrophages in the presence of MDNA109FEAA^{C125}-FcMDNA413^{R39/Q111}(2:1:2); FIG. 77D shows phenotyping of IL-13 treated macrophages in the presence of hu anti-PD1-MDNA413^{R39/Q111}(1:2); and FIG. 77E shows phenotyping of IL-13 treated macrophages in the presence of mouse anti-PD1-MDNA413^{R39/Q111}(1:2). In each case, dotted lines represent: IL-13 only control, dashed lines represent: M0 control.

TABLE 37
Inhibition of IL-13 Mediated M2 Polarization (IC50 values from 2 donors
separated by comma)

| | IL-13 Mediated M2 | IL-13 Mediated M2 |
|---|---|---|
| | polarization | polarization |
| Construct | CD206 (IC50 nM) | CD209 (IC50 nM) |
| Fc-MDNA413^{R39/Q111}(1:2) | ND, 12.78 | 0.036, 11.97 |
| Fc4-MDNA413^{R39/Q111}(1:2) | 0.48, ND | 1.60, 0.492 |
| MDNA109FEAAC125-Fc- | 1.45, 2.48 | 0.49, 2.4 |
| MDNA413^{R39/Q111}(2:1:2) | | |
| Human anti-PD1- | ND, 13.2 | 6.7, 12.1 |
| MDNA413^{R39/Q111}(1:2) | | |
| Mouse anti-PD1- | ND, 10.8 | 6.2, 7.05 |
| MDNA413^{R39/Q111}(1:2) | | |

[0646] The examples set forth above are provided to give those of ordinary skill in the art a complete disclosure and description of how to make and use the embodiments of the compositions, systems and methods of the invention, and are not intended to limit the scope of what the inventors regard as their invention. Modifications of the above-described modes for carrying out the invention that are obvious to persons of skill in the art are intended to be within the scope of the following claims. All patents and publications mentioned in the specification are indicative of the levels of skill of those skilled in the art to which the invention pertains. All references cited in this disclosure are incorporated by reference to the same extent as if each reference had been incorporated by reference in its entirety individually.

[0647] All headings and section designations are used for clarity and reference purposes only and are not to be considered limiting in any way. For example, those of skill in the art will appreciate the usefulness of combining various aspects from different headings and sections as appropriate according to the spirit and scope of the invention described herein.

[0648] All references cited herein are hereby incorporated by reference herein in their entireties and for all purposes to the same extent as if each individual publication or patent or patent application was specifically and individually indicated to be incorporated by reference in its entirety for all purposes.

[0649] Many modifications and variations of this application can be made without departing from its spirit and scope, as will be apparent to those skilled in the art. The specific embodiments and examples described herein are offered by way of example only, and the application is to be limited only by the terms of the appended claims, along with the full scope of equivalents to which the claims are entitled.

1. A bispecific IL-2 cytokine fusion, comprising an IL-2 mutein fused to a second cytokine, wherein the IL-2 mutein comprises the following amino acid substitutions: L80F, R81D, L85V, I86V, and I92F, wherein numbering is in accordance with the wild-type human IL-2 of SEQ ID NO:2.

2. (canceled)

3. The bispecific IL-2 cytokine fusion of claim 1, wherein the IL-2 mutein further comprises F42A substitution, wherein numbering is in accordance with the wild-type human IL-2 of SEQ ID NO:2.

4. The bispecific IL-2 cytokine fusion of claim 1, wherein the IL-2 mutein further comprises K43N substitution, wherein numbering is in accordance with the wild-type human IL-2 of SEQ ID NO:2.

5. The bispecific IL-2 cytokine fusion of claim 1, wherein the IL-2 mutein further comprises Y45A substitution, wherein numbering is in accordance with the wild-type human IL-2 of SEQ ID NO:2.

6. The bispecific IL-2 cytokine fusion of claim 1, wherein the IL-2 mutein further comprises E62A substitution, wherein numbering is in accordance with the wild-type human IL-2 of SEQ ID NO:2.

7. The bispecific IL-2 cytokine fusion of claim 1, wherein the IL-2 mutein further comprises an E62A substitution and an F42A substitution, wherein numbering is in accordance with the wild-type human IL-2 of SEQ ID NO:2.

8. The bispecific IL-2 cytokine fusion of claim 1, wherein the IL-2 mutein is an IL-2 mutein sequence as described in Tables 2, 4, 5, and/or 6.

9. The bispecific IL-2 cytokine fusion of claim 1, wherein the bispecific IL-2 cytokine fusion comprises a sequence as described in Tables 2, 4, 5, 6, 10, and/or 12, and/or FIG. 54.

10. The bispecific IL-2 cytokine fusion of claim 1, wherein the bispecific IL-2 cytokine fusion further comprises an Fc antibody fragment.

11. The bispecific IL-2 cytokine fusion of claim 10, wherein the Fc antibody fragment is a human Fc antibody fragment.

12. The bispecific IL-2 cytokine fusion of claim 10, wherein the Fc antibody fragment comprises a N297A substitution.

13. The bispecific IL-2 cytokine fusion of claim 1, wherein the bispecific IL-2 cytokine fusion further comprises albumin.

14. The bispecific IL-2 cytokine fusion of claim 1, wherein the second cytokine is selected from the group consisting of IL-4, IL-13, IL-10, IL-12, IL15, and IL-18.

15. The bispecific IL-2 cytokine fusion of claim 1, wherein the second cytokine is IL-4 or IL-13.

16. The bispecific IL-2 cytokine fusion of claim 1, where the second cytokine is as described in Table 7 and/or Table 8 and/or Table 12 and/or Table 28 and/or FIG. 54.

17. The bispecific IL-2 cytokine fusion of claim 1, wherein the bispecific IL-2 cytokine fusion exhibits increased binding capacity for IL-2Rβ as compared to wild-type human IL-2.

18. The bispecific IL-2 cytokine fusion of claim 1, wherein the bispecific IL-2 cytokine fusion exhibits a greater binding affinity for IL-2Rβ as compared to wild-type human IL-2.

19. The bispecific IL-2 cytokine fusion of claim 1, wherein the bispecific IL-2 cytokine fusion exhibits abrogated IL2Ra binding (i.e., does not significantly bind to IL2Rα).

20. The bispecific IL-2 cytokine fusion of claim 1, wherein the bispecific IL-2 cytokine fusion exhibits decreased binding affinity for CD25 as compared to wild-type human IL-2.

21. The bispecific IL-2 cytokine fusion of claim 1, wherein the bispecific IL-2 cytokine fusion comprises SEQ ID NO:146, SEQ ID NO:147, SEQ ID NOs:148 and 213, SEQ ID NOs:149 and 213, SEQ ID NO:150, SEQ ID NOs:151 and 214, SEQ ID NO:152, SEQ ID NO:153, SEQ ID NO:154, SEQ ID NO:155, SEQ ID NO:156, SEQ ID NOs:157 and 213, SEQ ID NO:158, SEQ ID NO:159, SEQ ID NO:160, SEQ ID NOs:161 and 215, SEQ ID NOs:162 and 216, SEQ ID NO:163, SEQ ID NO:164, SEQ ID NOs:165 and 213, SEQ ID NOs:166 and 213, or SEQ ID NOs:167 and 217, or a sequence from Table 12 or Table 28 or FIG. 54.

22. The bispecific IL-2 cytokine fusion of claim 1, wherein the bispecific IL-2 cytokine fusion comprises MDNA413-Fc-MDNA109, MDNA109FEAA-Fc-MDNA413, Fc-MDNA132 (1:1 KiH), Fc-A11 (1:2), Fc-A11 (1:2), Fc-MDNA413 (1:2), Fc-MDNA413 (1:2), Fc4-MDNA413 (1:2), MDNA413-Fc (1:1 KIH), MDNA109-Fc (2:1), MDNA-109FEAA-Fc (2:1), Fc-MDNA109 (1:2), MDNA109FEAA-Fc-MDNA132 (2:1:1 KiH), MDNA413-Fc-MDNA132 (2:1:1 KiH), MDNA109FEAA-Fc-MDNA413 (2:1:2)—version 1, MDNA109FEAA-Fc-MDNA413 (2:1:2)—version 2, MDNA132-Fc-MDNA109 (1:1:1 KIH), MDNA413-Fc-MDNA109 (1:1:1 KIH), MDNA132-Fc-MDNA109FEAA (1:1:1 KIH), or MDNA109-Fc-MDNA413.

23. A method of treating cancer comprising administering a bispecific IL-2 cytokine fusion of claim 1.

24. The method of claim 23, wherein the cancer is selected from the group consisting of prostate cancer, ovarian cancer, breast cancer, endometrial cancer, multiple myeloma, melanoma, lymphomas, lung cancers including small cell lung cancer, kidney cancer, liver cancer, colon cancer, colorectal cancer, pancreatic cancer, gastric cancer, and brain cancer.

25. The method of claim 24, wherein the cancer is colon cancer.

26. A method of treating cancer comprising administering a combination treatment comprising:
(i) an anti-PD-1 antibody or inhibitor or an anti-PD-L1 antibody or inhibitor, and
(ii) a bispecific IL-2 cytokine fusion of claim 1.

27. The method of claim 26, wherein the anti-PD-1 antibody or inhibitor is selected from the group consisting of nivolumab, BMS-936558, MDX-1106, ONO-4538, AMP224, CT-011, and MK-3475(pembrolizumab), cemiplimab (REGN2810), SHR-1210 (CTR20160175 and CTR20170090), SHR-1210 (CTR20170299 and CTR20170322), JS-001 (CTR20160274), IBI308 (CTR20160735), BGB-A317 (CTR20160872) and a PD-1 antibody as recited in Table 38.

28. The method of claim 27, wherein the anti-PD-L1 antibody or inhibitor is selected from the group consisting of atezolizumab, avelumab, and Durvalumab.

29. The method of claim 26, wherein the cancer is selected from the group consisting of prostate cancer, ovarian cancer, breast cancer, endometrial cancer, multiple myeloma, melanoma, lymphomas, lung cancers including small cell lung cancer, kidney cancer, liver cancer, colon cancer, colorectal cancer, pancreatic cancer, gastric cancer, and brain cancer.

30. The method of claim 27, wherein the cancer is colon cancer.

31. A pharmaceutical composition comprising a bispecific IL-2 cytokine fusion of claim 1, and a pharmaceutically acceptable carrier.

32. A pharmaceutical composition comprising an anti-PD-1 antibody or inhibitor, a bispecific TL-2 cytokine fusion of claim 1, and a pharmaceutically acceptable carrier.

The application's sequence listing, which the Patent Office published only in electronic form, follows.

SEQUENCE LISTING (369 sequences)

SEQ ID NO: 1 - protein, 153 aa, Homo sapiens
MYRMQLLSCIALSLALVTNSAPTSSSTKKTQLQLEHLLLDLQMILNGINNYKNPKLTRMLTFKFYMPKKATELKHLQCLEEELKPLEEVLNLAQSKNFHLRPRDLISNINVIVLELKGSETTFMCEYADETATIVEFLNRWITFCQSIISTLT

SEQ ID NO: 2 - protein, 133 aa, Homo sapiens [sequence omitted]

SEQ ID NO: 3 - protein, 169 aa, Mus musculus
MYSMQLASCVTLTLVLLVNSAPTSSSTSSSTAEAQQQQQQQQQQQQHLEQLLMDLQELLSRMENYRNLKLPRMLTFKFYLPKQATELKDLQCLEDELGPLRHVLDLTQSKSFQLEDAENFISNIRVTVVKLKGSDNTFECQFDDESATVVDFLRRWIAFCQSIISTSPQ

SEQ ID NO: 4 - protein, 149 aa, Mus musculus
APTSSSTSSSTAEAQQQQQQQQQQQQHLEQLLMDLQELLSRMENYRNLKLPRMLTFKFYLPKQATELKDLQCLEDELGPLRHVLDLTQSKSFQLEDAENFISNIRVTVVKLKGSDNTFECQFDDESATVVDFLRRWIAFCQSIISTSPQ

SEQ ID NO: 5 - protein, 133 aa, Homo sapiens
APTSSSTKKTQLQLEHLLLDLQMILNGINNYKNPKLTRMLTFKFYMPKKATELKHLQCLEEELKPLEEVLNLAQSKNFHFDPRDVVSNINVFVLELKGSETTFMCEYADETATIVEFLNRWITFCQSIISTLT

SEQ ID NO: 6 - protein, 133 aa, Artificial Sequence
  Synthetic IL-2 mutein protein
APTSSSTKKTQLQLEHLLLDLQMILNGINNYKNPKLTRMLTAKFYMPKKATELKHLQCLEEELKPLEEVLNLAQSKNFHFDPRDVVSNINVFVLELKGSETTFMCEYADETATIVEFLNRWITFCQSIISTLT

SEQ ID NO: 7 - protein, 133 aa, Artificial Sequence
  Synthetic IL-2 mutein protein
APTSSSTKKTQLQLEHLLLDLQMILNGINNYKNPKLTRMLTFNFYMPKKATELKHLQCLEEELKPLEEVLNLAQSKNFHFDPRDVVSNINVFVLELKGSETTFMCEYADETATIVEFLNRWITFCQSIISTLT

SEQ ID NO: 8 - protein, 133 aa, Artificial Sequence
  Synthetic IL-2 mutein protein
APTSSSTKKTQLQLEHLLLDLQMILNGINNYKNPKLTRMLTAKFAMPKKATELKHLQCLEEELKPLEEVLNLAQSKNFHFDPRDVVSNINVFVLELKGSETTFMCEYADETATIVEFLNRWITFCQSIISTLT

SEQ ID NO: 9 - protein, 133 aa, Artificial Sequence
  Synthetic IL-2 mutein protein
APTSSSTKKTQLQLEHLLLDLQMILNGINNYKNPKLTRMLTAKFYMPKKATELKHLQCLEEALKPLEEVLNLAQSKNFHFDPRDVVSNINVFVLELKGSETTFMCEYADETATIVEFLNRWITFCQSIISTLT

SEQ ID NO: 10 - protein, 133 aa, Artificial Sequence
  Synthetic IL-2 mutein protein
APTSSSTKKTQLQLEHLLLDLQMILNGINNYKNPKLTRMLTAKFAMPKKATELKHLQCLEEALKPLEEVLNLAQSKNFHFDPRDVVSNINVFVLELKGSETTFMCEYADETATIVEFLNRWITFCQSIISTLT

SEQ ID NO: 11 - protein, 395 aa, Artificial Sequence
  Synthetic IL-2 mutein protein
MYRMQLLSCIALSLALVTNSAPTSSSTKKTQLQLEHLLLDLQMILNGINNYKNPKLTRMLTFKFYMPKKATELKHLQCLEEELKPLEEVLNLAQSKNFHLRPRDLISNINVIVLELKGSETTFMCEYADETATIVEFLNRWITFCQSIISTLTGGGGSGGGGSGGGGSDKTHTCPPCPAPELLGGPSVFLFPPKPKDTLMISRTPEVTCVVVDVSHEDPEVKFNWYVDGVEVHNAKTKPREEQYASTYRVVSVLTVLHQDWLNGKEYKCKVSNKALPAPIEKTISKAKGQPREPQVYTLPPSREEMTKNQVSLTCLVKGFYPSDIAVEWESNGQPENNYKTTPPVLDSDGSFFLYSKLTVDKSRWQQGNVFSCSVMHEALHNHYTQKSLSLSPGK

SEQ ID NO: 12 - protein, 395 aa, Artificial Sequence
  Synthetic IL-2 mutein protein
MYRMQLLSCIALSLALVTNSAPTSSSTKKTQLQLEHLLLDLQMILNGINNYKNPKLTRMLTFKFYMPKKATELKHLQCLEEELKPLEEVLNLAQSKNFHFDPRDVVSNINVFVLELKGSETTFMCEYADETATIVEFLNRWITFCQSIISTLTGGGGSGGGGSGGGGSDKTHTCPPCPAPELLGGPSVFLFPPKPKDTLMISRTPEVTCVVVDVSHEDPEVKFNWYVDGVEVHNAKTKPREEQYASTYRVVSVLTVLHQDWLNGKEYKCKVSNKALPAPIEKTISKAKGQPREPQVYTLPPSREEMTKNQVSLTCLVKGFYPSDIAVEWESNGQPENNYKTTPPVLDSDGSFFLYSKLTVDKSRWQQGNVFSCSVMHEALHNHYTQKSLSLSPGK

SEQ ID NO: 13 - protein, 395 aa, Artificial Sequence
  Synthetic IL-2 mutein protein
MYRMQLLSCIALSLALVTNSAPTSSSTKKTQLQLEHLLLDLQMILNGINNYKNPKLTRMLTAKFAMPKKATELKHLQCLEEELKPLEEVLNLAQSKNFHFDPRDVVSNINVFVLELKGSETTFMCEYADETATIVEFLNRWITFCQSIISTLTGGGGSGGGGSGGGGSDKTHTCPPCPAPELLGGPSVFLFPPKPKDTLMISRTPEVTCVVVDVSHEDPEVKFNWYVDGVEVHNAKTKPREEQYASTYRVVSVLTVLHQDWLNGKEYKCKVSNKALPAPIEKTISKAKGQPREPQVYTLPPSREEMTKNQVSLTCLVKGFYPSDIAVEWESNGQPENNYKTTPPVLDSDGSFFLYSKLTVDKSRWQQGNVFSCSVMHEALHNHYTQKSLSLSPGK

SEQ ID NO: 14 - protein, 395 aa, Artificial Sequence
  Synthetic IL-2 mutein protein
MYRMQLLSCIALSLALVTNSAPTSSSTKKTQLQLEHLLLDLQMILNGINNYKNPKLTRMLTAKFYMPKKATELKHLQCLEEALKPLEEVLNLAQSKNFHFDPRDVVSNINVFVLELKGSETTFMCEYADETATIVEFLNRWITFCQSIISTLTGGGGSGGGGSGGGGSDKTHTCPPCPAPELLGGPSVFLFPPKPKDTLMISRTPEVTCVVVDVSHEDPEVKFNWYVDGVEVHNAKTKPREEQYASTYRVVSVLTVLHQDWLNGKEYKCKVSNKALPAPIEKTISKAKGQPREPQVYTLPPSREEMTKNQVSLTCLVKGFYPSDIAVEWESNGQPENNYKTTPPVLDSDGSFFLYSKLTVDKSRWQQGNVFSCSVMHEALHNHYTQKSLSLSPGK

SEQ ID NO: 15 - protein, 395 aa, Artificial Sequence
  Synthetic IL-2 mutein protein
MYRMQLLSCIALSLALVTNSAPTSSSTKKTQLQLEHLLLDLQMILNGINNYKNPKLTRMLTAKFAMPKKATELKHLQCLEEALKPLEEVLNLAQSKNFHFDPRDVVSNINVFVLELKGSETTFMCEYADETATIVEFLNRWITFCQSIISTLTGGGGSGGGGSGGGGSDKTHTCPPCPAPELLGGPSVFLFPPKPKDTLMISRTPEVTCVVVDVSHEDPEVKFNWYVDGVEVHNAKTKPREEQYASTYRVVSVLTVLHQDWLNGKEYKCKVSNKALPAPIEKTISKAKGQPREPQVYTLPPSREEMTKNQVSLTCLVKGFYPSDIAVEWESNGQPENNYKTTPPVLDSDGSFFLYSKLTVDKSRWQQGNVFSCSVMHEALHNHYTQKSLSLSPGK

SEQ ID NO: 16 - protein, 10 aa, Artificial Sequence
  Synthetic protein linker
GGGGSGGGGS

SEQ ID NO: 17 - protein, 15 aa, Artificial Sequence
  Synthetic protein linker
GGGGSGGGGSGGGGS

SEQ ID NO: 18 - protein, 20 aa, Artificial Sequence
  Synthetic protein linker
GGGGSGGGGSGGGGSGGGGS

SEQ ID NO: 19 - protein, 20 aa, Artificial Sequence
  Synthetic protein linker
GGGGSGGGGSGGGGSGGGGS

SEQ ID NO: 20 - protein, 133 aa, Artificial Sequence
  Synthetic IL-2 mutein protein
APTSSSTKKTQLQLEHLLLDLQMILNGINNYKNPKLTRMLTFKFYMPKKATELKHLQCLEEELKPLEEVLNLARSKNFHLRPRDLISNINVIVLELKGSETTFMCEYADETATIVEFLNRWITFCQSIISTLT

SEQ ID NO: 21 - protein, 133 aa, Artificial Sequence
  Synthetic IL-2 mutein protein
APTSSSTKKTQLQLEHLLLDLQMILNGINNYKNPKLTRMLTFKFYMPKKATELKHLQCLEEELKPLEEVLNLARSKNFHLRPRDVISNINVIVLELKGSETTFMCEYADETATIVEFLNRWITFCQSIISTLT

SEQ ID NO: 22 - protein, 133 aa, Artificial Sequence
  Synthetic IL-2 mutein protein
APTSSSTKKTQLQLEHLLLDLQMILNGINNYKNPKLTRMLTFKFYMPKKATELKHLQCLEEELKPLEEVLNLARSKNFHLIPRDVISNINVIVLELKGSETTFMCEYADETATIVEFLNRWITFCQSIISTLT

SEQ ID NO: 23 - protein, 133 aa, Artificial Sequence
  Synthetic IL-2 mutein protein
APTSSSTKKTQLQLEHLLLDLQMILNGINNYKNPKLTRMLTFKFYMPKKATELKHLQCLEEELKPLEEVLNLAHSKNFHLTPRDVVSNINVFILELKGSETTFMCEYADETATIVEFLNRWITFCQSIISTLT

SEQ ID NO: 24 - protein, 133 aa, Artificial Sequence
  Synthetic IL-2 mutein protein
APTSSSTKKTQLQLEHLLLDLQMILNGINNYKNPKLTRMLTFKFYMPKKATELKHLQCLEEELKPLEEVLNLANSKNFHFDPRDVVSNVNVFVLELKGSETTFMCEYADETATIVEFLNRWITFCQSIISTLT

SEQ ID NO: 25 - protein, 133 aa, Artificial Sequence
  Synthetic IL-2 mutein protein
APTSSSTKKTQLQLEHLLLDLQMVLNGINNYKNPKLTRMLTFKFYMPKKATELKHLQCLEEELKPLEEVLNLASSKNFHFDPRDVVSNINVFVLELKGSETTFMCEYADETATIVEFLNRWITFCQSIISTLT

SEQ ID NO: 26 - protein, 133 aa, Artificial Sequence
  Synthetic IL-2 mutein protein
APTSSSTKKTQLQLEHLLLDLQMILNGINNYKNPKLTRMLTFKFYMPKKATELKHLQCLEEELKHLEEVLNLANSKNFHVTPRDVVSNINVFVLELKGSETTFMCEYADETATIVEFLNRWITFCQSIISTLT

SEQ ID NO: 27 - protein, 133 aa, Artificial Sequence
  Synthetic IL-2 mutein protein
APTSSSTKKTQLQLEHLLLDLQMILNGINNYKNPKLTRMLTFKFYMPKKATELKHLQCLEEELKPLEEVLNLAHSKNFHFDPRDVVSNINVFVLELKGSETTFMCEYADETATIVEFLNRWITFCQSIISTLT

SEQ ID NO: 28 - protein, 133 aa, Artificial Sequence
  Synthetic IL-2 mutein protein
APTSSSTKKTQLQLEHLLLDLQMILNGINNYKNPKLTRMLTFKFYMPKKATELKHLQCLEEELKPLEEVLNLASSKNFHFDPRDVVSNINVFVLELKGSETTFMCEYADETATIVEFLNRWITFCQSIISTLT

SEQ ID NO: 29 - protein, 133 aa, Artificial Sequence
  Synthetic IL-2 mutein protein
APTSSSTKKTQLQLEHLLLDLQMILNGINNYKNPKLTRMLTFKFYMPKKATELKHLQCLEEELKPLEEVLNLANSKNFHFDPRDVVSNINVFVLELKGSETTFMCEYADETATIVEFLNRWITFCQSIISTLT

SEQ ID NO: 30 - protein, 133 aa, Artificial Sequence
  Synthetic IL-2 mutein protein
APTSSSTKKTQLQLEHLLLDLQMILNGINNYKNPKLTRMLTFKFYMPKKATELKHLQCLEEELKPLEEVLNLASSKNFHLTPRDVISNINVFVLELKGSETTFMCEYADETATIVEFLNRWITFCQSIISTLT

SEQ ID NO: 31 - protein, 133 aa, Artificial Sequence; identical to SEQ ID NO: 5
  Synthetic IL-2 mutein protein

SEQ ID NO: 32 - protein, 133 aa, Artificial Sequence; identical to SEQ ID NO: 27
  Synthetic IL-2 mutein protein

SEQ ID NO: 33 - protein, 133 aa, Artificial Sequence; identical to SEQ ID NO: 28
  Synthetic IL-2 mutein protein

SEQ ID NO: 34 - protein, 133 aa, Artificial Sequence; identical to SEQ ID NO: 29
  Synthetic IL-2 mutein protein

SEQ ID NO: 35 - protein, 133 aa, Artificial Sequence; identical to SEQ ID NO: 24
  Synthetic IL-2 mutein protein

SEQ ID NO: 36 - protein, 133 aa, Artificial Sequence
  Synthetic IL-2 mutein protein
APTSSSTKKTQLQLEHLRLDLEMILNGINNYKNPKLTRMLTFKFYMPKKATELKHLQCLEEELKPLEEVLNLAQSKNFHFDPRDVVSNINVFVLELKGSETTFMCEYADETATIVEFLNRWITFCTSIISTLT

SEQ ID NO: 37 - protein, 133 aa, Artificial Sequence
  Synthetic IL-2 mutein protein
APTSSSTKKTQLQLEHLRLDLEMILNGINNYKNPKLTRMLTFKFYMPKKATELKHLQCLEEELKPLEEVLNLAQSKNFHFDPRDVVSNINVFVLELKGSETTFMCEYADETATIVEFLNRWITFCTSIIRTLT

SEQ ID NO: 38 - protein, 168 aa, Artificial Sequence
  Synthetic Pro-Apoptotic Fusion protein
MFQIPEFEPSEQEDSSSAERGLGPSPAGDGPSGSGKHHRQAPGLLWDASHQQEQPTSSSHHGGAGAVEIRSRHSAYPAGTEDDEGMGEEPSPFRGRSRAAPPNLWAAQRYGRELRRMSDEFVDSFKKGLPRPKSAGTATQMRQSSSWTRVFQSWWDRNLGRGSSAPSQ

SEQ ID NO: 39 - protein, 168 aa, Artificial Sequence
  Synthetic Pro-Apoptotic Fusion protein
MFQIPEFEPSEQEDSSSAERGLGPSPAGDGPSGSGKHHRQAPGLLWDASHQQEQPTSSSHHGGAGAVEIRSRHSSYPAGTEDDEGMGEEPSPFRGRSRSAPPNLWAAQRYGRELRRMSDEFVDSFKKGLPRPKSAGTATQMRQSSSWTRVFQSWWDRNLGRGSSAPSQ

SEQ ID NO: 40 - protein, 192 aa, Artificial Sequence
  Synthetic Pro-Apoptotic Fusion protein
MDGSGEQPRGGGPTSSEQIMKTGALLLQGFIQDRAGRMGGEAPELALDPVPQDASTKKLSECLKRIGDELDSNMELQRMIAAVDTDSPREVFFRVAADMFSDGNFNWGRVVALFYFASKLVLKALCTKVPELIRTIMGWTLDFLRERLLGWIQDQGGWDGLLSYFGTPTWQTVTIFVAGVLTASLTIWKKMG

SEQ ID NO: 41 - protein, 211 aa, Artificial Sequence
  Synthetic Pro-Apoptotic Fusion protein
MASGQGPGPPRQECGEPALPSASEEQVAQDTEEVFRSYVFYRHQQEQEAEGVAAPADPEMVTLPLQPSSTMGQVGRQLAIIGDDINRRYDSEFQTMLQHLQPTAENAYEYFTKIATSLFESGINWGRVVALLGFGYRLALHVYQHGLTGFLGQVTRFVVDFMLHHCIARWIAQRGGWVAALNLGNGPILNVLVVLGVVLLGQFVVRRFFKS

SEQ ID NO: 42 - protein, 160 aa, Artificial Sequence
  Synthetic Pro-Apoptotic Fusion protein
MSEVRPLSRDILMETLLYEQLLEPPTMEVLGMTDSEEDLDPMEDFDSLECMEGSDALALRLACIGDEMDVSLRAPRLAQLSEVAMHSLGLAFIYDQTEDIRDVLRSFMDGFTTLKENIMRFWRSPNPGSWVSCEQVLLALLLLLALLLPLLSGGLHLLLK

SEQ ID NO: 43 - protein, 195 aa, Artificial Sequence
  Synthetic Pro-Apoptotic Fusion protein
MDCEVNNGSSLRDECITNLLVFGFLQSCSDNSFRRELDALGHELPVLAPQWEGYDELQTDGNRSSHSRLGRIEADSESQEDIIRNIARHLAQVGDSMDRSIPPGLVNGLALQLRNTSRSEEDRNRDLATALEQLLQAYPRDMEKEKTMLVLALLLAKKVASHTPSLLRDVFHTTVNFINQNLRTYVRSLARNGMD

SEQ ID NO: 44 - protein, 371 aa, Artificial Sequence
  Synthetic Anti-Apoptotic Fusion protein
APTSSSTKKTQLQLEHLLLDLQMILNGINNYKNPKLTRMLTFKFYMPKKATELKHLQCLEEELKPLEEVLNLASSKNFHFDPRDVVSNINVFVLELKGSETTFMCEYADETATIVEFLNRWITFCQSIISTLTGGGGSMSQSNRELVVDFLSYKLSQKGYSWSQFSDVEENRTEAPEGTESEMETPSAINGNPSWHLADSPAVNGATGHSSSLDAREVIPMAAVKQALREAGDEFELRYRRAFSDLTSQLHITPGTAYQSFEQVVNELFRDGVNWGRIVAFFSFGGALCVESVDKEMQVLVSRIAAWMATYLNDHLEPWIQENGGWDTFVELYGNNAAAESRKGQERFNRWFLTGMTVAGVVLLGSLFSRK

SEQ ID NO: 45 - protein, 371 aa, Artificial Sequence
  Synthetic Anti-Apoptotic Fusion protein
APTSSSTKKTQLQLEHLLLDLQMILNGINNYKNPKLTRMLTFKFYMPKKATELKHLQCLEEELKPLEEVLNLANSKNFHFDPRDVVSNINVFVLELKGSETTFMCEYADETATIVEFLNRWITFCQSIISTLTGGGGSMSQSNRELVVDFLSYKLSQKGYSWSQFSDVEENRTEAPEGTESEMETPSAINGNPSWHLADSPAVNGATGHSSSLDAREVIPMAAVKQALREAGDEFELRYRRAFSDLTSQLHITPGTAYQSFEQVVNELFRDGVNWGRIVAFFSFGGALCVESVDKEMQVLVSRIAAWMATYLNDHLEPWIQENGGWDTFVELYGNNAAAESRKGQERFNRWFLTGMTVAGVVLLGSLFSRK

SEQ ID NO: 46 - protein, 371 aa, Artificial Sequence
  Synthetic Anti-Apoptotic Fusion protein
APTSSSTKKTQLQLEHLLLDLQMILNGINNYKNPKLTRMLTFKFYMPKKATELKHLQCLEEELKPLEEVLNLANSKNFHFDPRDVVSNVNVFVLELKGSETTFMCEYADETATIVEFLNRWITFCQSIISTLTGGGGSMSQSNRELVVDFLSYKLSQKGYSWSQFSDVEENRTEAPEGTESEMETPSAINGNPSWHLADSPAVNGATGHSSSLDAREVIPMAAVKQALREAGDEFELRYRRAFSDLTSQLHITPGTAYQSFEQVVNELFRDGVNWGRIVAFFSFGGALCVESVDKEMQVLVSRIAAWMATYLNDHLEPWIQENGGWDTFVELYGNNAAAESRKGQERFNRWFLTGMTVAGVVLLGSLFSRK

SEQ ID NO: 47 - protein, 375 aa, Artificial Sequence
  Synthetic Extended Half-Life Fusion protein
APTSSSTKKTQLQLEHLLLDLQMILNGINNYKNPKLTRMLTFKFYMPKKATELKHLQCLEEELKPLEEVLNLAQSKNFHFDPRDVVSNINVFVLELKGSETTFMCEYADETATIVEFLNRWITFCQSIISTLTGGGGSGGGGSGGGGSDKTHTCPPCPAPELLGGPSVFLFPPKPKDTLMISRTPEVTCVVVDVSHEDPEVKFNWYVDGVEVHNAKTKPREEQYASTYRVVSVLTVLHQDWLNGKEYKCKVSNKALPAPIEKTISKAKGQPREPQVYTLPPSREEMTKNQVSLTCLVKGFYPSDIAVEWESNGQPENNYKTTPPVLDSDGSFFLYSKLTVDKSRWQQGNVFSCSVMHEALHNHYTQKSLSLSPGK

SEQ ID NO: 48 - protein, 375 aa, Artificial Sequence; identical to SEQ ID NO: 47
  Synthetic Extended Half-Life Fusion protein

SEQ ID NO: 49 - protein, 375 aa, Artificial Sequence; identical to SEQ ID NO: 47
  Synthetic Extended Half-Life Fusion protein

SEQ ID NO: 50 - protein, 375 aa, Artificial Sequence
  Synthetic Extended Half-Life Fusion protein
APTSSSTKKTQLQLEHLLLDLQMILNGINNYKNPKLTRMLTAKFAMPKKATELKHLQCLEEELKPLEEVLNLAQSKNFHFDPRDVVSNINVFVLELKGSETTFMCEYADETATIVEFLNRWITFCQSIISTLTGGGGSGGGGSGGGGSDKTHTCPPCPAPELLGGPSVFLFPPKPKDTLMISRTPEVTCVVVDVSHEDPEVKFNWYVDGVEVHNAKTKPREEQYASTYRVVSVLTVLHQDWLNGKEYKCKVSNKALPAPIEKTISKAKGQPREPQVYTLPPSREEMTKNQVSLTCLVKGFYPSDIAVEWESNGQPENNYKTTPPVLDSDGSFFLYSKLTVDKSRWQQGNVFSCSVMHEALHNHYTQKSLSLSPGK

SEQ ID NO: 51 - protein, 375 aa, Artificial Sequence
  Synthetic Extended Half-Life Fusion protein
APTSSSTKKTQLQLEHLLLDLQMILNGINNYKNPKLTRMLTAKFYMPKKATELKHLQCLEEALKPLEEVLNLAQSKNFHFDPRDVVSNINVFVLELKGSETTFMCEYADETATIVEFLNRWITFCQSIISTLTGGGGSGGGGSGGGGSDKTHTCPPCPAPELLGGPSVFLFPPKPKDTLMISRTPEVTCVVVDVSHEDPEVKFNWYVDGVEVHNAKTKPREEQYASTYRVVSVLTVLHQDWLNGKEYKCKVSNKALPAPIEKTISKAKGQPREPQVYTLPPSREEMTKNQVSLTCLVKGFYPSDIAVEWESNGQPENNYKTTPPVLDSDGSFFLYSKLTVDKSRWQQGNVFSCSVMHEALHNHYTQKSLSLSPGK

SEQ ID NO: 52 - protein, 375 aa, Artificial Sequence
  Synthetic Extended Half-Life Fusion protein
APTSSSTKKTQLQLEHLLLDLQMILNGINNYKNPKLTRMLTFKFYMPKKATELKHLQCLEEELKPLEEVLNLAHSKNFHFDPRDVVSNINVFVLELKGSETTFMCEYADETATIVEFLNRWITFCQSIISTLTGGGGSGGGGSGGGGSDKTHTCPPCPAPELLGGPSVFLFPPKPKDTLMISRTPEVTCVVVDVSHEDPEVKFNWYVDGVEVHNAKTKPREEQYASTYRVVSVLTVLHQDWLNGKEYKCKVSNKALPAPIEKTISKAKGQPREPQVYTLPPSREEMTKNQVSLTCLVKGFYPSDIAVEWESNGQPENNYKTTPPVLDSDGSFFLYSKLTVDKSRWQQGNVFSCSVMHEALHNHYTQKSLSLSPGK

SEQ ID NO: 53 - protein, 375 aa, Artificial Sequence
  Synthetic Extended Half-Life Fusion protein
APTSSSTKKTQLQLEHLLLDLQMILNGINNYKNPKLTRMLTFKFYMPKKATELKHLQCLEEELKPLEEVLNLASSKNFHFDPRDVVSNINVFVLELKGSETTFMCEYADETATIVEFLNRWITFCQSIISTLTGGGGSGGGGSGGGGSDKTHTCPPCPAPELLGGPSVFLFPPKPKDTLMISRTPEVTCVVVDVSHEDPEVKFNWYVDGVEVHNAKTKPREEQYASTYRVVSVLTVLHQDWLNGKEYKCKVSNKALPAPIEKTISKAKGQPREPQVYTLPPSREEMTKNQVSLTCLVKGFYPSDIAVEWESNGQPENNYKTTPPVLDSDGSFFLYSKLTVDKSRWQQGNVFSCSVMHEALHNHYTQKSLSLSPGK

SEQ ID NO: 54 - protein, 375 aa, Artificial Sequence
  Synthetic Extended Half-Life Fusion protein
APTSSSTKKTQLQLEHLLLDLQMILNGINNYKNPKLTRMLTFKFYMPKKATELKHLQCLEEELKPLEEVLNLANSKNFHFDPRDVVSNINVFVLELKGSETTFMCEYADETATIVEFLNRWITFCQSIISTLTGGGGSGGGGSGGGGSDKTHTCPPCPAPELLGGPSVFLFPPKPKDTLMISRTPEVTCVVVDVSHEDPEVKFNWYVDGVEVHNAKTKPREEQYASTYRVVSVLTVLHQDWLNGKEYKCKVSNKALPAPIEKTISKAKGQPREPQVYTLPPSREEMTKNQVSLTCLVKGFYPSDIAVEWESNGQPENNYKTTPPVLDSDGSFFLYSKLTVDKSRWQQGNVFSCSVMHEALHNHYTQKSLSLSPGK

SEQ ID NO: 55 - protein, 375 aa, Artificial Sequence
  Synthetic Extended Half-Life Fusion protein
APTSSSTKKTQLQLEHLLLDLQMILNGINNYKNPKLTRMLTFKFYMPKKATELKHLQCLEEELKPLEEVLNLANSKNFHFDPRDVVSNVNVFVLELKGSETTFMCEYADETATIVEFLNRWITFCQSIISTLTGGGGSGGGGSGGGGSDKTHTCPPCPAPELLGGPSVFLFPPKPKDTLMISRTPEVTCVVVDVSHEDPEVKFNWYVDGVEVHNAKTKPREEQYASTYRVVSVLTVLHQDWLNGKEYKCKVSNKALPAPIEKTISKAKGQPREPQVYTLPPSREEMTKNQVSLTCLVKGFYPSDIAVEWESNGQPENNYKTTPPVLDSDGSFFLYSKLTVDKSRWQQGNVFSCSVMHEALHNHYTQKSLSLSPGK

SEQ ID NO: 56 - protein, 375 aa, Artificial Sequence
  Synthetic Extended Half-Life Fusion protein
APTSSSTKKTQLQLEHLRLDLEMILNGINNYKNPKLTRMLTFKFYMPKKATELKHLQCLEEELKPLEEVLNLAQSKNFHFDPRDVVSNINVFVLELKGSETTFMCEYADETATIVEFLNRWITFCTSIISTLTGGGGSGGGGSGGGGSDKTHTCPPCPAPELLGGPSVFLFPPKPKDTLMISRTPEVTCVVVDVSHEDPEVKFNWYVDGVEVHNAKTKPREEQYASTYRVVSVLTVLHQDWLNGKEYKCKVSNKALPAPIEKTISKAKGQPREPQVYTLPPSREEMTKNQVSLTCLVKGFYPSDIAVEWESNGQPENNYKTTPPVLDSDGSFFLYSKLTVDKSRWQQGNVFSCSVMHEALHNHYTQKSLSLSPGK

SEQ ID NO: 57 - protein, 375 aa, Artificial Sequence
  Synthetic Extended Half-Life Fusion protein
APTSSSTKKTQLQLEHLRLDLEMILNGINNYKNPKLTRMLTFKFYMPKKATELKHLQCLEEELKPLEEVLNLAQSKNFHFDPRDVVSNINVFVLELKGSETTFMCEYADETATIVEFLNRWITFCTSIIRTLTGGGGSGGGGSGGGGSDKTHTCPPCPAPELLGGPSVFLFPPKPKDTLMISRTPEVTCVVVDVSHEDPEVKFNWYVDGVEVHNAKTKPREEQYASTYRVVSVLTVLHQDWLNGKEYKCKVSNKALPAPIEKTISKAKGQPREPQVYTLPPSREEMTKNQVSLTCLVKGFYPSDIAVEWESNGQPENNYKTTPPVLDSDGSFFLYSKLTVDKSRWQQGNVFSCSVMHEALHNHYTQKSLSLSPGK

SEQ ID NO: 58 - protein, 375 aa, Artificial Sequence
  Synthetic Extended Half-Life Fusion protein
APTSSSTKKTQLQLEHLRLDLEMILNGINNYKNPKLTRMLTAKFAMPKKATELKHLQCLEEELKPLEEVLNLAQSKNFHFDPRDVVSNINVFVLELKGSETTFMCEYADETATIVEFLNRWITFCTSIISTLTGGGGSGGGGSGGGGSDKTHTCPPCPAPELLGGPSVFLFPPKPKDTLMISRTPEVTCVVVDVSHEDPEVKFNWYVDGVEVHNAKTKPREEQYASTYRVVSVLTVLHQDWLNGKEYKCKVSNKALPAPIEKTISKAKGQPREPQVYTLPPSREEMTKNQVSLTCLVKGFYPSDIAVEWESNGQPENNYKTTPPVLDSDGSFFLYSKLTVDKSRWQQGNVFSCSVMHEALHNHYTQKSLSLSPGK

SEQ ID NO: 59 - protein, 375 aa, Artificial Sequence
  Synthetic Extended Half-Life Fusion protein
APTSSSTKKTQLQLEHLRLDLEMILNGINNYKNPKLTRMLTAKFAMPKKATELKHLQCLEEELKPLEEVLNLAQSKNFHFDPRDVVSNINVFVLELKGSETTFMCEYADETATIVEFLNRWITFCTSIIRTLTGGGGSGGGGSGGGGSDKTHTCPPCPAPELLGGPSVFLFPPKPKDTLMISRTPEVTCVVVDVSHEDPEVKFNWYVDGVEVHNAKTKPREEQYASTYRVVSVLTVLHQDWLNGKEYKCKVSNKALPAPIEKTISKAKGQPREPQVYTLPPSREEMTKNQVSLTCLVKGFYPSDIAVEWESNGQPENNYKTTPPVLDSDGSFFLYSKLTVDKSRWQQGNVFSCSVMHEALHNHYTQKSLSLSPGK

SEQ ID NO: 60 - protein, 375 aa, Artificial Sequence
  Synthetic Extended Half-Life Fusion protein
APTSSSTKKTQLQLEHLRLDLEMILNGINNYKNPKLTRMLTAKFYMPKKATELKHLQCLEEALKPLEEVLNLAQSKNFHFDPRDVVSNINVFVLELKGSETTFMCEYADETATIVEFLNRWITFCTSIISTLTGGGGSGGGGSGGGGSDKTHTCPPCPAPELLGGPSVFLFPPKPKDTLMISRTPEVTCVVVDVSHEDPEVKFNWYVDGVEVHNAKTKPREEQYASTYRVVSVLTVLHQDWLNGKEYKCKVSNKALPAPIEKTISKAKGQPREPQVYTLPPSREEMTKNQVSLTCLVKGFYPSDIAVEWESNGQPENNYKTTPPVLDSDGSFFLYSKLTVDKSRWQQGNVFSCSVMHEALHNHYTQKSLSLSPGK

SEQ ID NO: 61 - protein, 375 aa, Artificial Sequence
  Synthetic Extended Half-Life Fusion protein
APTSSSTKKTQLQLEHLRLDLEMILNGINNYKNPKLTRMLTAKFYMPKKATELKHLQCLEEALKPLEEVLNLAQSKNFHFDPRDVVSNINVFVLELKGSETTFMCEYADETATIVEFLNRWITFCTSIIRTLTGGGGSGGGGSGGGGSDKTHTCPPCPAPELLGGPSVFLFPPKPKDTLMISRTPEVTCVVVDVSHEDPEVKFNWYVDGVEVHNAKTKPREEQYASTYRVVSVLTVLHQDWLNGKEYKCKVSNKALPAPIEKTISKAKGQPREPQVYTLPPSREEMTKNQVSLTCLVKGFYPSDIAVEWESNGQPENNYKTTPPVLDSDGSFFLYSKLTVDKSRWQQGNVFSCSVMHEALHNHYTQKSLSLSPGK

SEQ ID NO: 62 - protein, 733 aa, Artificial Sequence
  Synthetic Extended Half-Life Fusion protein
DAHKSEVAHRFKDLGEENFKALVLIAFAQYLQQCPFEDHVKLVNEVTEFAKTCVADESAENCDKSLHTLFGDKLCTVATLRETYGEMADCCAKQEPERNECFLQHKDDNPNLPRLVRPEVDVMCTAFHDNEETFLKKYLYEIARRHPYFYAPELLFFAKRYKAAFTECCQAADKAACLLPKLDELRDEGKASSAKQRLKCASLQKFGERAFKAWAVARLSQRFPKAEFAEVSKLVTDLTKVHTECCHGDLLECADDRADLAKYICENQDSISSKLKECCEKPLLEKSHCIAEVENDEMPADLPSLAADFVESKDVCKNYAEAKDVFLGMFLYEYARRHPDYSVVLLLRLAKTYETTLEKCCAAADPHECYAKVFDEFKPLVEEPQNLIKQNCELFEQLGEYKFQNALLVRYTKKVPQVSTPTLVEVSRNLGKVGSKCCKHPEAKRMPCAEDYLSVVLNQLCVLHEKTPVSDRVTKCCTESLVNRRPCFSALEVDETYVPKEFNAETFTFHADICTLSEKERQIKKQTALVELVKHKPKATKEQLKAVMDDFAAFVEKCCKADDKETCFAEEGKKLVAASQAALGLGGGGSGGGGSGGGGSAPTSSSTKKTQLQLEHLLLDLQMILNGINNYKNPKLTRMLTFKFYMPKKATELKHLQCLEEELKPLEEVLNLAQSKNFHFDPRDVVSNINVFVLELKGSETTFMCEYADETATIVEFLNRWITFCQSIISTLT

SEQ ID NO: 63 - protein, 733 aa, Artificial Sequence
  Synthetic Extended Half-Life Fusion protein
DAHKSEVAHRFKDLGEENFKALVLIAFAQYLQQCPFEDHVKLVNEVTEFAKTCVADESAENCDKSLHTLFGDKLCTVATLRETYGEMADCCAKQEPERNECFLQHKDDNPNLPRLVRPEVDVMCTAFHDNEETFLKKYLYEIARRHPYFYAPELLFFAKRYKAAFTECCQAADKAACLLPKLDELRDEGKASSAKQRLKCASLQKFGERAFKAWAVARLSQRFPKAEFAEVSKLVTDLTKVHTECCHGDLLECADDRADLAKYICENQDSISSKLKECCEKPLLEKSHCIAEVENDEMPADLPSLAADFVESKDVCKNYAEAKDVFLGMFLYEYARRHPDYSVVLLLRLAKTYETTLEKCCAAADPHECYAKVFDEFKPLVEEPQNLIKQNCELFEQLGEYKFQNALLVRYTKKVPQVSTPTLVEVSRNLGKVGSKCCKHPEAKRMPCAEDYLSVVLNQLCVLHEKTPVSDRVTKCCTESLVNRRPCFSALEVDETYVPKEFNAETFTFHADICTLSEKERQIKKQTALVELVKHKPKATKEQLKAVMDDFAAFVEKCCKADDKETCFAEEGKKLVAASQAALGLGGGGSGGGGSGGGGSAPTSSSTKKTQLQLEHLLLDLQMILNGINNYKNPKLTRMLTAKFAMPKKATELKHLQCLEEELKPLEEVLNLAQSKNFHFDPRDVVSNINVFVLELKGSETTFMCEYADETATIVEFLNRWITFCQSIISTLT

SEQ ID NO: 64 - protein, 733 aa, Artificial Sequence
  Synthetic Extended Half-Life Fusion protein
DAHKSEVAHRFKDLGEENFKALVLIAFAQYLQQCPFEDHVKLVNEVTEFAKTCVADESAENCDKSLHTLFGDKLCTVATLRETYGEMADCCAKQEPERNECFLQHKDDNPNLPRLVRPEVDVMCTAFHDNEETFLKKYLYEIARRHPYFYAPELLFFAKRYKAAFTECCQAADKAACLLPKLDELRDEGKASSAKQRLKCASLQKFGERAFKAWAVARLSQRFPKAEFAEVSKLVTDLTKVHTECCHGDLLECADDRADLAKYICENQDSISSKLKECCEKPLLEKSHCIAEVENDEMPADLPSLAADFVESKDVCKNYAEAKDVFLGMFLYEYARRHPDYSVVLLLRLAKTYETTLEKCCAAADPHECYAKVFDEFKPLVEEPQNLIKQNCELFEQLGEYKFQNALLVRYTKKVPQVSTPTLVEVSRNLGKVGSKCCKHPEAKRMPCAEDYLSVVLNQLCVLHEKTPVSDRVTKCCTESLVNRRPCFSALEVDETYVPKEFNAETFTFHADICTLSEKERQIKKQTALVELVKHKPKATKEQLKAVMDDFAAFVEKCCKADDKETCFAEEGKKLVAASQAALGLGGGGSGGGGSGGGGSAPTSSSTKKTQLQLEHLLLDLQMILNGINNYKNPKLTRMLTAKFYMPKKATELKHLQCLEEALKPLEEVLNLAQSKNFHFDPRDVVSNINVFVLELKGSETTFMCEYADETATIVEFLNRWITFCQSIISTLT

SEQ ID NO: 65 - protein, 733 aa, Artificial Sequence
  Synthetic Extended Half-Life Fusion protein
APTSSSTKKTQLQLEHLLLDLQMILNGINNYKNPKLTRMLTFKFYMPKKATELKHLQCLEEELKPLEEVLNLAHSKNFHFDPRDVVSNINVFVLELKGSETTFMCEYADETATIVEFLNRWITFCQSIISTLTGGGGSGGGGSGGGGSDAHKSEVAHRFKDLGEENFKALVLIAFAQYLQQCPFEDHVKLVNEVTEFAKTCVADESAENCDKSLHTLFGDKLCTVATLRETYGEMADCCAKQEPERNECFLQHKDDNPNLPRLVRPEVDVMCTAFHDNEETFLKKYLYEIARRHPYFYAPELLFFAKRYKAAFTECCQAADKAACLLPKLDELRDEGKASSAKQRLKCASLQKFGERAFKAWAVARLSQRFPKAEFAEVSKLVTDLTKVHTECCHGDLLECADDRADLAKYICENQDSISSKLKECCEKPLLEKSHCIAEVENDEMPADLPSLAADFVESKDVCKNYAEAKDVFLGMFLYEYARRHPDYSVVLLLRLAKTYETTLEKCCAAADPHECYAKVFDEFKPLVEEPQNLIKQNCELFEQLGEYKFQNALLVRYTKKVPQVSTPTLVEVSRNLGKVGSKCCKHPEAKRMPCAEDYLSVVLNQLCVLHEKTPVSDRVTKCCTESLVNRRPCFSALEVDETYVPKEFNAETFTFHADICTLSEKERQIKKQTALVELVKHKPKATKEQLKAVMDDFAAFVEKCCKADDKETCFAEEGKKLVAASQAALGL

SEQ ID NO: 66 - protein, 733 aa, Artificial Sequence
  Synthetic Extended Half-Life Fusion protein
APTSSSTKKTQLQLEHLLLDLQMILNGINNYKNPKLTRMLTAKFYMPKKATELKHLQCLEEALKPLEEVLNLAHSKNFHFDPRDVVSNINVFVLELKGSETTFMCEYADETATIVEFLNRWITFCQSIISTLTGGGGSGGGGSGGGGSDAHKSEVAHRFKDLGEENFKALVLIAFAQYLQQCPFEDHVKLVNEVTEFAKTCVADESAENCDKSLHTLFGDKLCTVATLRETYGEMADCCAKQEPERNECFLQHKDDNPNLPRLVRPEVDVMCTAFHDNEETFLKKYLYEIARRHPYFYAPELLFFAKRYKAAFTECCQAADKAACLLPKLDELRDEGKASSAKQRLKCASLQKFGERAFKAWAVARLSQRFPKAEFAEVSKLVTDLTKVHTECCHGDLLECADDRADLAKYICENQDSISSKLKECCEKPLLEKSHCIAEVENDEMPADLPSLAADFVESKDVCKNYAEAKDVFLGMFLYEYARRHPDYSVVLLLRLAKTYETTLEKCCAAADPHECYAKVFDEFKPLVEEPQNLIKQNCELFEQLGEYKFQNALLVRYTKKVPQVSTPTLVEVSRNLGKVGSKCCKHPEAKRMPCAEDYLSVVLNQLCVLHEKTPVSDRVTKCCTESLVNRRPCFSALEVDETYVPKEFNAETFTFHADICTLSEKERQIKKQTALVELVKHKPKATKEQLKAVMDDFAAFVEKCCKADDKETCFAEEGKKLVAASQAALGL

SEQ ID NO: 67 - protein, 733 aa, Artificial Sequence
  Synthetic Extended Half-Life Fusion protein
APTSSSTKKTQLQLEHLLLDLQMILNGINNYKNPKLTRMLTFKFYMPKKATELKHLQCLEEELKPLEEVLNLASSKNFHFDPRDVVSNINVFVLELKGSETTFMCEYADETATIVEFLNRWITFCQSIISTLTGGGGSGGGGSGGGGSDAHKSEVAHRFKDLGEENFKALVLIAFAQYLQQCPFEDHVKLVNEVTEFAKTCVADESAENCDKSLHTLFGDKLCTVATLRETYGEMADCCAKQEPERNECFLQHKDDNPNLPRLVRPEVDVMCTAFHDNEETFLKKYLYEIARRHPYFYAPELLFFAKRYKAAFTECCQAADKAACLLPKLDELRDEGKASSAKQRLKCASLQKFGERAFKAWAVARLSQRFPKAEFAEVSKLVTDLTKVHTECCHGDLLECADDRADLAKYICENQDSISSKLKECCEKPLLEKSHCIAEVENDEMPADLPSLAADFVESKDVCKNYAEAKDVFLGMFLYEYARRHPDYSVVLLLRLAKTYETTLEKCCAAADPHECYAKVFDEFKPLVEEPQNLIKQNCELFEQLGEYKFQNALLVRYTKKVPQVSTPTLVEVSRNLGKVGSKCCKHPEAKRMPCAEDYLSVVLNQLCVLHEKTPVSDRVTKCCTESLVNRRPCFSALEVDETYVPKEFNAETFTFHADICTLSEKERQIKKQTALVELVKHKPKATKEQLKAVMDDFAAFVEKCCKADDKETCFAEEGKKLVAASQAALGL

SEQ ID NO: 68 - protein, 733 aa, Artificial Sequence
  Synthetic Extended Half-Life Fusion protein
APTSSSTKKTQLQLEHLLLDLQMILNGINNYKNPKLTRMLTFKFYMPKKATELKHLQCLEEELKPLEEVLNLANSKNFHFDPRDVVSNINVFVLELKGSETTFMCEYADETATIVEFLNRWITFCQSIISTLTGGGGSGGGGSGGGGSDAHKSEVAHRFKDLGEENFKALVLIAFAQYLQQCPFEDHVKLVNEVTEFAKTCVADESAENCDKSLHTLFGDKLCTVATLRETYGEMADCCAKQEPERNECFLQHKDDNPNLPRLVRPEVDVMCTAFHDNEETFLKKYLYEIARRHPYFYAPELLFFAKRYKAAFTECCQAADKAACLLPKLDELRDEGKASSAKQRLKCASLQKFGERAFKAWAVARLSQRFPKAEFAEVSKLVTDLTKVHTECCHGDLLECADDRADLAKYICENQDSISSKLKECCEKPLLEKSHCIAEVENDEMPADLPSLAADFVESKDVCKNYAEAKDVFLGMFLYEYARRHPDYSVVLLLRLAKTYETTLEKCCAAADPHECYAKVFDEFKPLVEEPQNLIKQNCELFEQLGEYKFQNALLVRYTKKVPQVSTPTLVEVSRNLGKVGSKCCKHPEAKRMPCAEDYLSVVLNQLCVLHEKTPVSDRVTKCCTESLVNRRPCFSALEVDETYVPKEFNAETFTFHADICTLSEKERQIKKQTALVELVKHKPKATKEQLKAVMDDFAAFVEKCCKADDKETCFAEEGKKLVAASQAALGL

SEQ ID NO: 69 - protein, 733 aa, Artificial Sequence
  Synthetic Extended Half-Life Fusion protein
APTSSSTKKTQLQLEHLLLDLQMILNGINNYKNPKLTRMLTFKFYMPKKATELKHLQCLEEELKPLEEVLNLANSKNFHFDPRDVVSNVNVFVLELKGSETTFMCEYADETATIVEFLNRWITFCQSIISTLTGGGGSGGGGSGGGGSDAHKSEVAHRFKDLGEENFKALVLIAFAQYLQQCPFEDHVKLVNEVTEFAKTCVADESAENCDKSLHTLFGDKLCTVATLRETYGEMADCCAKQEPERNECFLQHKDDNPNLPRLVRPEVDVMCTAFHDNEETFLKKYLYEIARRHPYFYAPELLFFAKRYKAAFTECCQAADKAACLLPKLDELRDEGKASSAKQRLKCASLQKFGERAFKAWAVARLSQRFPKAEFAEVSKLVTDLTKVHTECCHGDLLECADDRADLAKYICENQDSISSKLKECCEKPLLEKSHCIAEVENDEMPADLPSLAADFVESKDVCKNYAEAKDVFLGMFLYEYARRHPDYSVVLLLRLAKTYETTLEKCCAAADPHECYAKVFDEFKPLVEEPQNLIKQNCELFEQLGEYKFQNALLVRYTKKVPQVSTPTLVEVSRNLGKVGSKCCKHPEAKRMPCAEDYLSVVLNQLCVLHEKTPVSDRVTKCCTESLVNRRPCFSALEVDETYVPKEFNAETFTFHADICTLSEKERQIKKQTALVELVKHKPKATKEQLKAVMDDFAAFVEKCCKADDKETCFAEEGKKLVAASQAALGL

SEQ ID NO: 70 - protein, 733 aa, Artificial Sequence
  Synthetic Extended Half-Life Fusion protein
APTSSSTKKTQLQLEHLLLDLQMILNGINNYKNPKLTRMLTAKFYMPKKATELKHLQCLEEALKPLEEVLNLAQSKNFHFDPRDVVSNINVFVLELKGSETTFMCEYADETATIVEFLNRWITFCQSIISTLTGGGGSGGGGSGGGGSDAHKSEVAHRFKDLGEENFKALVLIAFAQYLQQCPFEDHVKLVNEVTEFAKTCVADESAENCDKSLHTLFGDKLCTVATLRETYGEMADCCAKQEPERNECFLQHKDDNPNLPRLVRPEVDVMCTAFHDNEETFLKKYLYEIARRHPYFYAPELLFFAKRYKAAFTECCQAADKAACLLPKLDELRDEGKASSAKQRLKCASLQKFGERAFKAWAVARLSQRFPKAEFAEVSKLVTDLTKVHTECCHGDLLECADDRADLAKYICENQDSISSKLKECCEKPLLEKSHCIAEVENDEMPADLPSLAADFVESKDVCKNYAEAKDVFLGMFLYEYARRHPDYSVVLLLRLAKTYETTLEKCCAAADPHECYAKVFDEFKPLVEEPQNLIKQNCELFEQLGEYKFQNALLVRYTKKVPQVSTPTLVEVSRNLGKVGSKCCKHPEAKRMPCAEDYLSVVLNQLCVLHEKTPVSDRVTKCCTESLVNRRPCFSALEVDETYVPKEFNAETFTFHADICTLSEKERQIKKQTALVELVKHKPKATKEQLKAVMDDFAAFVEKCCKADDKETCFAEEGKKLVAASQAALGL

SEQ ID NO: 71 - protein, 733 aa, Artificial Sequence
  Synthetic Extended Half-Life Fusion protein
DAHKSEVAHRFKDLGEENFKALVLIAFAQYLQQCPFEDHVKLVNEVTEFAKTCVADESAENCDKSLHTLFGDKLCTVATLRETYGEMADCCAKQEPERNECFLQHKDDNPNLPRLVRPEVDVMCTAFHDNEETFLKKYLYEIARRHPYFYAPELLFFAKRYKAAFTECCQAADKAACLLPKLDELRDEGKASSAKQRLKCASLQKFGERAFKAWAVARLSQRFPKAEFAEVSKLVTDLTKVHTECCHGDLLECADDRADLAKYICENQDSISSKLKECCEKPLLEKSHCIAEVENDEMPADLPSLAADFVESKDVCKNYAEAKDVFLGMFLYEYARRHPDYSVVLLLRLAKTYETTLEKCCAAADPHECYAKVFDEFKPLVEEPQNLIKQNCELFEQLGEYKFQNALLVRYTKKVPQVSTPTLVEVSRNLGKVGSKCCKHPEAKRMPCAEDYLSVVLNQLCVLHEKTPVSDRVTKCCTESLVNRRPCFSALEVDETYVPKEFNAETFTFHADICTLSEKERQIKKQTALVELVKHKPKATKEQLKAVMDDFAAFVEKCCKADDKETCFAEEGKKLVAASQAALGLGGGGSGGGGSGGGGSAPTSSSTKKTQLQLEHLLLDLQMILNGINNYKNPKLTRMLTFKFYMPKKATELKHLQCLEEELKPLEEVLNLAHSKNFHFDPRDVVSNINVFVLELKGSETTFMCEYADETATIVEFLNRWITFCQSIISTLT

SEQ ID NO: 72 - protein, 733 aa, Artificial Sequence
  Synthetic Extended Half-Life Fusion protein
DAHKSEVAHRFKDLGEENFKALVLIAFAQYLQQCPFEDHVKLVNEVTEFAKTCVADESAENCDKSLHTLFGDKLCTVATLRETYGEMADCCAKQEPERNECFLQHKDDNPNLPRLVRPEVDVMCTAFHDNEETFLKKYLYEIARRHPYFYAPELLFFAKRYKAAFTECCQAADKAACLLPKLDELRDEGKASSAKQRLKCASLQKFGERAFKAWAVARLSQRFPKAEFAEVSKLVTDLTKVHTECCHGDLLECADDRADLAKYICENQDSISSKLKECCEKPLLEKSHCIAEVENDEMPADLPSLAADFVESKDVCKNYAEAKDVFLGMFLYEYARRHPDYSVVLLLRLAKTYETTLEKCCAAADPHECYAKVFDEFKPLVEEPQNLIKQNCELFEQLGEYKFQNALLVRYTKKVPQVSTPTLVEVSRNLGKVGSKCCKHPEAKRMPCAEDYLSVVLNQLCVLHEKTPVSDRVTKCCTESLVNRRPCFSALEVDETYVPKEFNAETFTFHADICTLSEKERQIKKQTALVELVKHKPKATKEQLKAVMDDFAAFVEKCCKADDKETCFAEEGKKLVAASQAALGLGGGGSGGGGSGGGGSAPTSSSTKKTQLQLEHLLLDLQMILNGINNYKNPKLTRMLTAKFYMPKKATELKHLQCLEEALKPLEEVLNLAHSKNFHFDPRDVVSNINVFVLELKGSETTFMCEYADETATIVEFLNRWITFCQSIISTLT

SEQ ID NO: 73 - protein, 733 aa, Artificial Sequence
  Synthetic Extended Half-Life Fusion protein
DAHKSEVAHRFKDLGEENFKALVLIAFAQYLQQCPFEDHVKLVNEVTEFAKTCVADESAENCDKSLHTLFGDKLCTVATLRETYGEMADCCAKQEPERNECFLQHKDDNPNLPRLVRPEVDVMCTAFHDNEETFLKKYLYEIARRHPYFYAPELLFFAKRYKAAFTECCQAADKAACLLPKLDELRDEGKASSAKQRLKCASLQKFGERAFKAWAVARLSQRFPKAEFAEVSKLVTDLTKVHTECCHGDLLECADDRADLAKYICENQDSISSKLKECCEKPLLEKSHCIAEVENDEMPADLPSLAADFVESKDVCKNYAEAKDVFLGMFLYEYARRHPDYSVVLLLRLAKTYETTLEKCCAAADPHECYAKVFDEFKPLVEEPQNLIKQNCELFEQLGEYKFQNALLVRYTKKVPQVSTPTLVEVSRNLGKVGSKCCKHPEAKRMPCAEDYLSVVLNQLCVLHEKTPVSDRVTKCCTESLVNRRPCFSALEVDETYVPKEFNAETFTFHADICTLSEKERQIKKQTALVELVKHKPKATKEQLKAVMDDFAAFVEKCCKADDKETCFAEEGKKLVAASQAALGLGGGGSGGGGSGGGGSAPTSSSTKKTQLQLEHLLLDLQMILNGINNYKNPKLTRMLTFKFYMPKKATELKHLQCLEEELKPLEEVLNLASSKNFHFDPRDVVSNINVFVLELKGSETTFMCEYADETATIVEFLNRWITFCQSIISTLT

SEQ ID NO: 74 - protein, 733 aa, Artificial Sequence
  Synthetic Extended Half-Life Fusion protein
DAHKSEVAHRFKDLGEENFKALVLIAFAQYLQQCPFEDHVKLVNEVTEFAKTCVADESAENCDKSLHTLFGDKLCTVATLRETYGEMADCCAKQEPERNECFLQHKDDNPNLPRLVRPEVDVMCTAFHDNEETFLKKYLYEIARRHPYFYAPELLFFAKRYKAAFTECCQAADKAACLLPKLDELRDEGKASSAKQRLKCASLQKFGERAFKAWAVARLSQRFPKAEFAEVSKLVTDLTKVHTECCHGDLLECADDRADLAKYICENQDSISSKLKECCEKPLLEKSHCIAEVENDEMPADLPSLAADFVESKDVCKNYAEAKDVFLGMFLYEYARRHPDYSVVLLLRLAKTYETTLEKCCAAADPHECYAKVFDEFKPLVEEPQNLIKQNCELFEQLGEYKFQNALLVRYTKKVPQVSTPTLVEVSRNLGKVGSKCCKHPEAKRMPCAEDYLSVVLNQLCVLHEKTPVSDRVTKCCTESLVNRRPCFSALEVDETYVPKEFNAETFTFHADICTLSEKERQIKKQTALVELVKHKPKATKEQLKAVMDDFAAFVEKCCKADDKETCFAEEGKKLVAASQAALGLGGGGSGGGGSGGGGSAPTSSSTKKTQLQLEHLLLDLQMILNGINNYKNPKLTRMLTFKFYMPKKATELKHLQCLEEELKPLEEVLNLANSKNFHFDPRDVVSNINVFVLELKGSETTFMCEYADETATIVEFLNRWITFCQSIISTLT

SEQ ID NO: 75 - protein, 733 aa, Artificial Sequence
  Synthetic Extended Half-Life Fusion protein
DAHKSEVAHRFKDLGEENFKALVLIAFAQYLQQCPFEDHVKLVNEVTEFAKTCVADESAENCDKSLHTLFGDKLCTVATLRETYGEMADCCAKQEPERNECFLQHKDDNPNLPRLVRPEVDVMCTAFHDNEETFLKKYLYEIARRHPYFYAPELLFFAKRYKAAFTECCQAADKAACLLPKLDELRDEGKASSAKQRLKCASLQKFGERAFKAWAVARLSQRFPKAEFAEVSKLVTDLTKVHTECCHGDLLECADDRADLAKYICENQDSISSKLKECCEKPLLEKSHCIAEVENDEMPADLPSLAADFVESKDVCKNYAEAKDVFLGMFLYEYARRHPDYSVVLLLRLAKTYETTLEKCCAAADPHECYAKVFDEFKPLVEEPQNLIKQNCELFEQLGEYKFQNALLVRYTKKVPQVSTPTLVEVSRNLGKVGSKCCKHPEAKRMPCAEDYLSVVLNQLCVLHEKTPVSDRVTKCCTESLVNRRPCFSALEVDETYVPKEFNAETFTFHADICTLSEKERQIKKQTALVELVKHKPKATKEQLKAVMDDFAAFVEKCCKADDKETCFAEEGKKLVAASQAALGLGGGGSGGGGSGGGGSAPTSSSTKKTQLQLEHLLLDLQMILNGINNYKNPKLTRMLTFKFYMPKKATELKHLQCLEEELKPLEEVLNLANSKNFHFDPRDVVSNVNVFVLELKGSETTFMCEYADETATIVEFLNRWITFCQSIISTLT

SEQ ID NO: 76 - protein, 395 aa, Artificial Sequence; identical to SEQ ID NO: 11
  Synthetic IL-2 mutein protein

SEQ ID NO: 77 - protein, 395 aa, Artificial Sequence; identical to SEQ ID NO: 12
  Synthetic IL-2 mutein protein

SEQ ID NO: 78 - protein, 395 aa, Artificial Sequence; identical to SEQ ID NO: 13
  Synthetic IL-2 mutein protein

SEQ ID NO: 79 - protein, 395 aa, Artificial Sequence; identical to SEQ ID NO: 14
  Synthetic IL-2 mutein protein

SEQ ID NO: 80 - protein, 395 aa, Artificial Sequence; identical to SEQ ID NO: 15
  Synthetic IL-2 mutein protein

SEQ ID NO: 81 - protein, 113 aa, Artificial Sequence
  Synthetic IL-13 protein
PGPVPPSTALRELIEELVNITQNQKAPLCNGSMVWSINLTAGMYCAALESLINVSGCSAIEKTQRMLSGFCPHKVSAGQFSSLHVRDTKIEVAQFVKDLLLHLKKLFREGQFN

SEQ ID NO: 82 - protein, 113 aa, Artificial Sequence
  Synthetic IL-13 protein
PGPVPPSTAVRALIEELINITQNQKAPLCNGSMVWSINRTAGMYCAALESLINVSGCSAIEKTQDMLSGFCPHKVSAGQFSSLHVRSSKIEVAQFVKDLLFHLRTLFREGQFN

SEQ ID NO: 83 - protein, 113 aa, Artificial Sequence
  Synthetic IL-13 protein
PGPVPPSTAIRELIEELINITQNQKAPLCNGSMVWSINLTAGMYCAALESLINVSGCSAIEKTQRMLSGFCPHKVSAGQFSSLHVRGSKIEVAQFVKDLLHHLRALFREGQFN

SEQ ID NO: 84 - protein, 113 aa, Artificial Sequence
  Synthetic IL-13 protein
PGPVPPSTAVRELIEELINITQNQKAPLCNGSMVWSINRTAGMYCAALESLINVSGCSAIEKTQRMLSGFCPHKVSAGQFSSLHVRSSKIEVAQFVKDLLFHLRTLFREGQFN

SEQ ID NO: 85 - protein, 113 aa, Artificial Sequence
  Synthetic IL-13 protein
PGPVPPSTALIELIEELINITQNQKAPLCNGSMVWSINLTAGIYCAALESLINVSGCSAIEKTQRMLSGFCPHKVSAGQFSSLHVKGSKIEVAQFVKDLLHHLRALMREGQFN

SEQ ID NO: 86 - protein, 113 aa, Artificial Sequence
  Synthetic IL-13 protein
PGPVPPSTAIRELIEELLNITQNQKAPLCNGSMVWSINLTAGMYCAALESLINVSGCSAIEKTQRMLSGFCPHKVSAGQFSSLHVMKSKIEVAQFVKDLLHHLRALFREGQFN

SEQ ID NO: 87 - protein, 113 aa, Artificial Sequence
  Synthetic IL-13 protein
PGPVPPSTAIRELIEELINITQNQKAPLCNGSMVWSINLTAGMYCAALESLINVSGCSAIEKTQRMLSGFCPHKVSAGQFSSLHVRSSRIEVAQFVKDLLHHLRTLFREGQFN

SEQ ID NO: 88 - protein, 113 aa, Artificial Sequence
  Synthetic IL-13 protein
PGPVPPSTALRELIEELINITQNEKAPLCNGSMVWSINLTAGIYCAALESLINVSGCSAIEKTQRMLSGFCPHKVSAGQFSSLHVTGSKIEVAQFVKDLLYHLRALFREGQFN

SEQ ID NO: 89 - protein, 113 aa, Artificial Sequence
  Synthetic IL-13 protein
PGPVPPSTALSELIEELINITQNQKAPLCNGSMVWSINPTAGMYCAALESLINVSGCSAIEKTQRMLSGFCPHKVAAGQFSSLHDKGSMIEVAQFVKDLLYHLRTLFREGQFN

SEQ ID NO: 90 - protein, 113 aa, Artificial Sequence
  Synthetic IL-13 protein
PGPVPPSTATRELIEELINITQNQKAPLCNGSMVWSINLTADMYCAALESLINVSGCSAIEKTQRMLSGFCPHKVSVGQFSSLHVRGSKIEVAQFVKDLLYHLRTLFREGQFN

SEQ ID NO: 91 - protein, 113 aa, Artificial Sequence
  Synthetic IL-13 protein
PGPVPPSTADIELIAELINITQNQKAPLCNGSMVWSINLTADMYCAALESLINVSGCSAIEKTQRMLSGFCPHKVSAGQFSSLHVKKTRIEVAQFVKDLLLHLKKLFKEGQFN

SEQ ID NO: 92 - protein, 113 aa, Artificial Sequence
  Synthetic IL-13 protein
PGPVPPSTAARELIEELVNITQNQKAPLCNGSMVWSINLTAGMYCAALESLINVSGCSAIEKTQRMLSGFCPHKVSAGQLSSLHVTGKRIEVAQFVKDLLNHLRALFKEGQFN

SEQ ID NO: 93 - protein, 113 aa, Artificial Sequence
  Synthetic IL-13 protein
PGPVPPSTAVRELIEELVNITQNQKAPLCNGSMVWSINLTAGMYCAALESLINVSGCSAIEKTQRMLSGFCPHKVSAGQFSSLHVRDTRIEVAQFVKDLLNHLKELFTEGQFN

SEQ ID NO: 94 - protein, 113 aa, Artificial Sequence
  Synthetic IL-13 protein
PGPVPPSTALSELMEELVNITQNQKAPLCNGSMVWSINLTAGMYCAALESLINVSGCSAIEKTQRMLSGFCPHKVSAGQFSSLHVRDSKIEVAQFVKDLLNHLKALFKEGQFN

SEQ ID NO: 95 - protein, 112 aa, Artificial Sequence
  Synthetic IL-13 protein
GPVPPSTAFRELIEELVNITQNQKAPLCNGSMVWSINLTAGMYCAALESLINVSGCSAIEKTQRMLSGFCPHKVSPGQFSSLHVTNSRIEVAQFVKDLLNHLKALFKEGQYN

SEQ ID NO: 96 - protein, 112 aa, Artificial Sequence
  Synthetic IL-13 protein
GPVPPSTAHLELIEELINITQNQKAPLCNGSMVWSINLTAGMYCAALESLINVSGCSAIEKTQRMLSGFCPHKVSAGQFSSLHVKETRIEVAQFVKDLLNHLKTLFKEGQFN

SEQ ID NO: 97 - protein, 113 aa, Artificial Sequence
  Synthetic IL-13 protein
PGPVPPSTAHLELIEELINITQNQKAPLCNGSMVWSINPTAGMYCAALESLINVSGCSAIEKTQRMLSGFCPHKVSAGQFSSLHVMDTRIEVAQFVKDLLLHLKKLFKEGQFN

SEQ ID NO: 98 - protein, 113 aa, Artificial Sequence
  Synthetic IL-13 protein
PGPVPPSTAHRELIEELVNITQNQKAPLCNGSMVWSINLTAGMYCAALESLINVSGCSAIEKTQRMLSGFCPHKVSAGQFSSLHVTGRKIEVAQFVKDLLLHLKKLFKEGQFN

SEQ ID NO: 99 - protein, 113 aa, Artificial Sequence
  Synthetic IL-13 protein
PGPVPPSTAHRELIEELVNITQNQKAPLCNGSMVWRINRTAGMYCAALESLINVSGCSAIEKTQRMLSGFCPHKVSAGQFSSLHVMDSRIEVAQFVKDLLNHLRALFKEGQFN

SEQ ID NO: 100 - protein, 113 aa, Artificial Sequence
  Synthetic IL-13 protein
PGPVPPSTAARELIEELFNITQNQKAPLCNGSMVWSINLTAGMYCAALESLINVSGCSAIEKTKRMLSGFCPHKVSAGQFPSLHVKKTRIEVAQFVKDLLIHLRKLFKEGQFN

SEQ ID NO: 101 - protein, 113 aa, Artificial Sequence
  Synthetic IL-13 protein
PGPVPPSTALIELIEELINITQNQKAPLCNGSMVWSINLTAGMYCAALESLINVSGCSAIEKTQRMLSGFCPHKVSAGQFSSLHVKGSKIEVAQFVKDLLHHLRALMREGQFN

SEQ ID NO: 102 - protein, 113 aa, Artificial Sequence; identical to SEQ ID NO: 86
  Synthetic IL-13 protein

SEQ ID NO: 103 - protein, 113 aa, Artificial Sequence; identical to SEQ ID NO: 83
  Synthetic IL-13 protein

SEQ ID NO: 104 - protein, 113 aa, Artificial Sequence; identical to SEQ ID NO: 87
  Synthetic IL-13 protein

SEQ ID NO: 105 - protein, 113 aa, Artificial Sequence
  Synthetic IL-13 protein
PGPVPPSTAVRELIEELINITQNQKAPLCNGSMVWSINLTAGMYCAALESLINVSGCSAIEKTQRMLSGFCPHKVSAGQFSSLHVRSSKIEVAQFVKDLLFHLRTLFREGQFN

SEQ ID NO: 106 - protein, 113 aa, Artificial Sequence
  Synthetic IL-13 protein
PGPVPPSTALRELIEELINITQNQKAPLCNGSMVWSINLTAGMYCAALESLINVSGCSAIEKTQRMLSGFCPHKVSAGQFSSLHVTGSKIEVAQFVKDLLYHLRALFREGQFN

SEQ ID NO: 107 - protein, 113 aa, Artificial Sequence
  Synthetic IL-13 protein
PGPVPPSTALSELIEELINITQNQKAPLCNGSMVWSINLTAGMYCAALESLINVSGCSAIEKTQRMLSGFCPHKVSAGQFSSLHVKGSMIEVAQFVKDLLYHLRTLFREGQFN

SEQ ID NO: 108 - protein, 113 aa, Artificial Sequence
  Synthetic IL-13 protein
PGPVPPSTATRELIEELINITQNQKAPLCNGSMVWSINLTAGMYCAALESLINVSGCSAIEKTQRMLSGFCPHKVSAGQFSSLHVRGSKIEVAQFVKDLLYHLRTLFREGQFN

SEQ ID NO: 109 - protein, 113 aa, Artificial Sequence
  Synthetic IL-13 protein
PGPVPPSTADIELIEELINITQNQKAPLCNGSMVWSINLTAGMYCAALESLINVSGCSAIEKTQRMLSGFCPHKVSAGQFSSLHVKKTRIEVAQFVKDLLLHLKKLFKEGQFN

SEQ ID NO: 110 - protein, 113 aa, Artificial Sequence
  Synthetic IL-13 protein
PGPVPPSTAARELIEELVNITQNQKAPLCNGSMVWSINLTAGMYCAALESLINVSGCSAIEKTQRMLSGFCPHKVSAGQFSSLHVTGKRIEVAQFVKDLLNHLRALFKEGQFN

SEQ ID NO: 111 - protein, 113 aa, Artificial Sequence; identical to SEQ ID NO: 93
  Synthetic IL-13 protein

SEQ ID NO: 112 - protein, 113 aa, Artificial Sequence; identical to SEQ ID NO: 94
  Synthetic IL-13 protein

SEQ ID NO: 113 - protein, 113 aa, Artificial Sequence
  Synthetic IL-13 protein
PGPVPPSTAHLELIEELINITQNQKAPLCNGSMVWSINLTAGMYCAALESLINVSGCSAIEKTQRMLSGFCPHKVSAGQFSSLHVKETRIEVAQFVKDLLNHLKTLFKEGQFN

SEQ ID NO: 114 - protein, 113 aa, Artificial Sequence
  Synthetic IL-13 protein
PGPVPPSTAHLELIEELINITQNQKAPLCNGSMVWSINLTAGMYCAALESLINVSGCSAIEKTQRMLSGFCPHKVSAGQFSSLHVMDTRIEVAQFVKDLLLHLKKLFKEGQFN

SEQ ID NO: 115 - protein, 113 aa, Artificial Sequence; identical to SEQ ID NO: 98
  Synthetic IL-13 protein

SEQ ID NO: 116 - protein, 113 aa, Artificial Sequence
  Synthetic IL-13 protein
PGPVPPSTAHRELIEELVNITQNQKAPLCNGSMVWSINLTAGMYCAALESLINVSGCSAIEKTQRMLSGFCPHKVSAGQFSSLHVMDSRIEVAQFVKDLLNHLRALFKEGQFN

SEQ ID NO: 117 - protein, 113 aa, Artificial Sequence
  Synthetic IL-13 protein
PGPVPPSTAARELIEELFNITQNQKAPLCNGSMVWSINLTAGMYCAALESLINVSGCSAIEKTQRMLSGFCPHKVSAGQFSSLHVKKTRIEVAQFVKDLLIHLRKLFKEGQFN

SEQ ID NO: 118 - protein, 113 aa, Artificial Sequence
  Synthetic IL-13 protein
PGPVPPSTAVRALIEELINITQNQKAPLCNGSMVWSINLTAGMYCAALESLINVSGCSAIEKTQDMLSGFCPHKVSAGQFSSLHVRSSKIEVAQFVKDLLFHLRTLFREGQFN

SEQ ID NO: 119 - protein, 146 aa, Artificial Sequence
  Synthetic IL-13 protein
MHPLLNPLLLALGLMALLLTTVIALTCLGGFASPGPVPPSTAHRELIEELVNITQNQKAPLCNGSMVWSINLTAGMYCAALESLINVSGCSAIEKTQRMLSGFCPHKVSAGQFSSLHVTGRKIEVAQFVKDLLLHLKKLFKEGQFN

SEQ ID NO: 120 - protein, 113 aa, Artificial Sequence; identical to SEQ ID NO: 82
  Synthetic IL-13 protein

SEQ ID NO: 121 - protein, 113 aa, Artificial Sequence; identical to SEQ ID NO: 118
  Synthetic IL-13 protein

SEQ ID NO: 122 - protein, 114 aa, Artificial Sequence
  Synthetic IL-13 protein
MPGPVPPSTALRELIEELVNITQNQKAPLCNGSMVWSINLTAGMYCAALESLINVSGCSAIEKTQRMLSGFCPHKVSAGQFSSLHVRDTKIEVAQFVKDLLLHLKKLFREGQFN

SEQ ID NO: 123 - protein, 117 aa, Artificial Sequence
  Synthetic IL-13 protein
MYCAALESLINVSGCSAIEKTQRMLSGFCPHKVSAGQFSSLHVRDTKIEVAQFVKDLLLHLKKLFREGQFNGGSGPGPVPPSTALRELIEELVNITQNQKAPLCNGSMVWSINLTAG

SEQ ID NO: 124 - protein, 118 aa, Artificial Sequence
  Synthetic IL-13 protein
MYCAALESLINVSGCSAIEKTQRMLSGFCPHKVSAGQFSSLHVRDTKIEVAQFVKDLLLHLKKLFREGQFNGGSGMPGPVPPSTALRELIEELVNITQNQKAPLCNGSMVWSINLTAG

SEQ ID NO: 125 - protein, 117 aa, Artificial Sequence
  Synthetic IL-13 protein
MYCAALESLINVSGCSAIEKTQRMLSGFCPHKVSAGQFSSLHVRSSKIEVAQFVKDLLFHLRTLFREGQFNGGSGPGPVPPSTAVRELIEELINITQNQKAPLCNGSMVWSINRTAG

SEQ ID NO: 126 - protein, 118 aa, Artificial Sequence
  Synthetic IL-13 protein
MYCAALESLINVSGCSAIEKTQRMLSGFCPHKVSAGQFSSLHVRSSKIEVAQFVKDLLFHLRTLFREGQFNGGSGMPGPVPPSTAVRELIEELINITQNQKAPLCNGSMVWSINRTAG

SEQ ID NO: 127 - protein, 117 aa, Artificial Sequence
  Synthetic IL-13 protein
MYCAALESLINVSGCSAIEKTQDMLSGFCPHKVSAGQFSSLHVRSSKIEVAQFVKDLLFHLRTLFREGQFNGGSGPGPVPPSTAVRALIEELINITQNQKAPLCNGSMVWSINLTAG

SEQ ID NO: 128 - protein, 118 aa, Artificial Sequence
  Synthetic IL-13 protein
MYCAALESLINVSGCSAIEKTQDMLSGFCPHKVSAGQFSSLHVRSSKIEVAQFVKDLLFHLRTLFREGQFNGGSGMPGPVPPSTAVRALIEELINITQNQKAPLCNGSMVWSINLTAG

SEQ ID NO: 129 - protein, 153 aa, Artificial Sequence [sequence omitted]

SEQ ID NO: 130 - protein, 130 aa, Artificial Sequence
  Synthetic IL-4 protein
MHKCDITLQEIIKTLNSLTEQKTLCTELTVTDIFAASKDTTEKETFCRAATVLRQFYSHHEKDTRCLGATAQQFHRHKQLIRFLKRLDRNLWGLAGLNSCPVKEANQSTLENFLERLKTIMREKYSKCSS

SEQ ID NO: 131 - protein, 128 aa, Artificial Sequence
  Synthetic IL-4 protein
KCDITLQEIIKTLNSLTEQKTLCTELTVTDIFAASKNTTEKETFCRAATVLRQFYSHHEKDTRCLGATAQQFHRHKQLIRFLKRLDRNLWGLAGLNSCPVKEANQSTLENFLERLKTIMKEKFRKCSS

SEQ ID NO: 132 - protein, 134 aa, Artificial Sequence
  Synthetic IL-4 protein
MDTTEKETFCRAATVLRQFYSHHEKDTRCLGATAQQFHRHKQLIRFLKRLDRNLWGLAGLNSCPVKEANQSTLENFLERLRVIMQSKWFKCGAGGNGGHKCDITLQEIIKTLNSLTEQKTLCTELTVTDIFAAS

SEQ ID NO: 133 - protein, 134 aa, Artificial Sequence
  Synthetic IL-4 protein
MDTTEKETFCRAATVLRQFYSHHEKDTRCLGATAQQFHRHKQLIRFLKRLDRNLWGLAGLNSCPVKEANQSTLENFLERLKTIMREKYSKCSSGGNGGHKCDITLQEIIKTLNSLTEQKTLCTELTVTDIFAAS

SEQ ID NO: 134 - protein, 252 aa, Artificial Sequence
  Synthetic IL-4 protein
MDTTEKETFCRAATVLRQFYSHHEKDTRCLGATAQQFHRHKQLIRFLKRLDRNLWGLAGLNSCPVKEANQSTLENFLERLKTIMKEKFRKCSSGGNGGHKCDITLQEIIKTLNSLTEQKTLCTELTVTDIFAASRQFYSHHEKDTRCLGATAQQFHRHKQLIRFLKRLDRNLWGLAGLNSCPVKEANQSTLENFLERLRVIMQSKWFKCGAGGNGGHKCDITLQEIIKTLNSLTEQKTLCTELTVTDIFAAS

SEQ ID NO: 135 - protein, 133 aa, Artificial Sequence
  Synthetic IL-4 protein
MDTTEKETFCRAATVLRQFYSHHEKDTRCLGATAQQFHRHKQLIRFLKRLDRNLWGLAGLNSCPVKEANQSTLENFLERLKTIMKEKFKCSSGGNGGHKCDITLQEIIKTLNSLTEQKTLCTELTVTDIFAAS

SEQ ID NO: 136 - protein, 178 aa, Artificial Sequence
  Synthetic IL-10 protein
MHSSALLCCLVLLTGVRASPGQGTQSENSCTHFPGNLPNMLRDLRDAFSRVKTFFQMKDQLDNLLLKESLLEDFKGYLGCQALSEMIQFYLEEVMPQAENQDPDIKAHVNSLGENLKTLRLRLRRCHRFLPCENKSKAVEQVKNAFNKLQEKGIYKAMSEFDIFINYIEAYMTMKIRN

SEQ ID NO: 137 - protein, 219 aa, Artificial Sequence
  Synthetic IL-12 protein
MCPARSLLLVATLVLLDHLSLARNLPVATPDPGMFPCLHHSQNLLRAVSNMLQKARQTLEFYPCTSEEIDHEDITKDKTSTVEACLPLELTKNESCLNSRETSFITNGSCLASRKTSFMMALCLSSIYEDLKMYQVEFKTMNAKLLMDPKRQIFLDQNMLAVIDELMQALNFNSETVPQKSSLEEPDFYKTKIKLCILLHAFRIRAVTIDRVMSYLNAS

SEQ ID NO: 138 - protein, 328 aa, Artificial Sequence
  Synthetic IL-12 protein
MCHQQLVISWFSLVFLASPLVAIWELKKDVYVVELDWYPDAPGEMVVLTCDTPEEDGITWTLDQSSEVLGSGKTLTIQVKEFGDAGQYTCHKGGEVLSHSLLLLHKKEDGIWSTDILKDQKEPKNKTFLRCEAKNYSGRFTCWWLTTISTDLTFSVKSSRGSSDPQGVTCGAATLSAERVRGDNKEYEYSVECQEDSACPAAEESLPIEVMVDAVHKLKYENYTSSFFIRDIIKPDPPKNLQLKPLKNSRQVEVSWEYPDTWSTPHSYFSLTFCVQVQGKSKREKKDRVFTDKTSATVICRKNASISVRAQDRYYSSSWSEWASVPCS

SEQ ID NO: 139 - protein, 162 aa, Artificial Sequence
  Synthetic IL-15 protein
MRISKPHLRSISIQCYLCLLLNSHFLTEAGIHVFILGCFSAGLPKTEANWVNVISDLKKIEDLIQSMHIDATLYTESDVHPSCKVTAMKCFLLELQVISLESGDASIHDTVENLIILANNSLSSNGNVTESGCKECEELEEKNIKEFLQSFVHIVQMFINTS

SEQ ID NO: 140 - protein, 193 aa, Artificial Sequence
  Synthetic IL-18 protein
MAAEPVEDNCINFVAMKFIDNTLYFIAEDDENLESDYFGKLESKLSVIRNLNDQVLFIDQGNRPLFEDMTDSDCRDNAPRTIFIISMYKDSQPRGMAVTISVKCEKISTLSCENKIISFKEMNPPDNIKDTKSDIIFFQRSVPGHDNKMQFESSSYEGYFLACEKERDLFKLILKKEDELGDRSIMFTVQNED

SEQ ID NO: 141 - protein, 157 aa, Artificial Sequence
  Synthetic IL-18 protein
YFGKLESKLSVIRNLNDQVLFIDQGNRPLFEDMTDSDCRDNAPRTIFIISMYKDSQPRGMAVTISVKCEKISTLSCENKIISFKEMNPPDNIKDTKSDIIFFQRSVPGHDNKMQFESSSYEGYFLACEKERDLFKLILKKEDELGDRSIMFTVQNED

SEQ ID NO: 142 - protein, 261 aa, Artificial Sequence
  Synthetic IL-2 Fusion protein
PGPVPPSTAVRALIEELINITQNQKAPLCNGSMVWSINRTAGMYCAALESLINVSGCSAIEKTQDMLSGFCPHKVSAGQFSSLHVRSSKIEVAQFVKDLLFHLRTLFREGQFNGGGGSGGGGSGGGGSAPTSSSTKKTQLQLEHLLLDLQMILNGINNYKNPKLTRMLTFKFYMPKKATELKHLQCLEEELKPLEEVLNLAQSKNFHFDPRDVVSNINVFVLELKGSETTFMCEYADETATIVEFLNRWITFCQSIISTLT

SEQ ID NO: 143 - protein, 261 aa, Artificial Sequence
  Synthetic IL-2 Fusion protein
PGPVPPSTAHRELIEELVNITQNQKAPLCNGSMVWSINLTAGMYCAALESLINVSGCSAIEKTQRMLSGFCPHKVSAGQFSSLHVTGRKIEVAQFVKDLLLHLKKLFKEGQFNGGGGSGGGGSGGGGSAPTSSSTKKTQLQLEHLLLDLQMILNGINNYKNPKLTRMLTFKFYMPKKATELKHLQCLEEELKPLEEVLNLAQSKNFHFDPRDVVSNINVFVLELKGSETTFMCEYADETATIVEFLNRWITFCQSIISTLT

SEQ ID NO: 144 - protein, 651 aa, Artificial Sequence
  Synthetic IL-2 Fusion protein
APTSSSTKKTQLQLEHLLLDLQMILNGINNYKNPKLTRMLTFKFYMPKKATELKHLQCLEEELKPLEEVLNLAQSKNFHFDPRDVVSNINVFVLELKGSETTFMCEYADETATIVEFLNRWITFCQSIISTLTGGGGSGGGGSGGGGSRNLPVATPDPGMFPCLHHSQNLLRAVSNMLQKARQTLEFYPCTSEEIDHEDITKDKTSTVEACLPLELTKNESCLNSRETSFITNGSCLASRKTSFMMALCLSSIYEDLKMYQVEFKTMNAKLLMDPKRQIFLDQNMLAVIDELMQALNFNSETVPQKSSLEEPDFYKTKIKLCILLHAFRIRAVTIDRVMSYLNASIWELKKDVYVVELDWYPDAPGEMVVLTCDTPEEDGITWTLDQSSEVLGSGKTLTIQVKEFGDAGQYTCHKGGEVLSHSLLLLHKKEDGIWSTDILKDQKEPKNKTFLRCEAKNYSGRFTCWWLTTISTDLTFSVKSSRGSSDPQGVTCGAATLSAERVRGDNKEYEYSVECQEDSACPAAEESLPIEVMVDAVHKLKYENYTSSFFIRDIIKPDPPKNLQLKPLKNSRQVEVSWEYPDTWSTPHSYFSLTFCVQVQGKSKREKKDRVFTDKTSATVICRKNASISVRAQDRYYSSSWSEWASVPCS

SEQ ID NO: 145 - protein, 305 aa, Artificial Sequence
  Synthetic IL-2 Fusion protein
APTSSSTKKTQLQLEHLLLDLQMILNGINNYKNPKLTRMLTFKFYMPKKATELKHLQCLEEELKPLEEVLNLAQSKNFHFDPRDVVSNINVFVLELKGSETTFMCEYADETATIVEFLNRWITFCQSIISTLTGGGGSGGGGSGGGGSYFGKLESKLSVIRNLNDQVLFIDQGNRPLFEDMTDSDCRDNAPRTIFIISMYKDSQPRGMAVTISVKCEKISTLSCENKIISFKEMNPPDNIKDTKSDIIFFQRSVPGHDNKMQFESSSYEGYFLACEKERDLFKLILKKEDELGDRSIMFTVQNED

SEQ ID NO: 146 - protein, 133 aa, Artificial Sequence
  Synthetic IL-2 mutein protein
APTSSSTKKTQLQLEHLLLDLQMILNGINNYKNPKLTRMLTAKFYMPKKATELKHLQCLEEALKPLEEVLNLAQSKNFHFDPRDVVSNINVFVLELKGSETTFMCEYADETATIVEFLNRWITFSQSIISTLT

SEQ ID NO: 147 - protein, 753 aa, Artificial Sequence
  Synthetic Extended Half-Life Fusion protein
MYRMQLLSCIALSLALVTNSAPTSSSTKKTQLQLEHLLLDLQMILNGINNYKNPKLTRMLTAKFYMPKKATELKHLQCLEEALKPLEEVLNLAQSKNFHFDPRDVVSNINVFVLELKGSETTFMCEYADETATIVEFLNRWITFSQSIISTLTGGGGSGGGGSGGGGSDAHKSEVAHRFKDLGEENFKALVLIAFAQYLQQCPFEDHVKLVNEVTEFAKTCVADESAENCDKSLHTLFGDKLCTVATLRETYGEMADCCAKQEPERNECFLQHKDDNPNLPRLVRPEVDVMCTAFHDNEETFLKKYLYEIARRHPYFYAPELLFFAKRYKAAFTECCQAADKAACLLPKLDELRDEGKASSAKQRLKCASLQKFGERAFKAWAVARLSQRFPKAEFAEVSKLVTDLTKVHTECCHGDLLECADDRADLAKYICENQDSISSKLKECCEKPLLEKSHCIAEVENDEMPADLPSLAADFVESKDVCKNYAEAKDVFLGMFLYEYARRHPDYSVVLLLRLAKTYETTLEKCCAAADPHECYAKVFDEFKPLVEEPQNLIKQNCELFEQLGEYKFQNALLVRYTKKVPQVSTPTLVEVSRNLGKVGSKCCKHPEAKRMPCAEDYLSVVLNQLCVLHEKTPVSDRVTKCCTESLVNRRPCFSALEVDETYVPKEFNAETFTFHADICTLSEKERQIKKQTALVELVKHKPKATKEQLKAVMDDFAAFVEKCCKADDKETCFAEEGKKLVAASQAALGL

SEQ ID NO: 148 - protein, 507 aa, Artificial Sequence
  Synthetic IL-2 Fusion protein
PGPVPPSTAHRELIEELVNITQNQKAPLCNGSMVWSINLTAGMYCAALESLINVSGCSAIEKTQRMLSGFCPHKVSAGQFSSLHVTGRKIEVAQFVKDLLLHLKKLFKEGQFNGGGGSGGGGSGGGGSDKTHTCPPCPAPELLGGPSVFLFPPKPKDTLMISRTPEVTCVVVDVSHEDPEVKFNWYVDGVEVHNAKTKPREEQYASTYRVVSVLTVLHQDWLNGKEYKCKVSNKALPAPIEKTISKAKGQPREPQVYTLPPCREEMTKNQVSLWCLVKGFYPSDIAVEWESNGQPENNYKTTPPVLDSDGSFFLYSKLTVDKSRWQQGNVFSCSVMHEALHNHYTQKSLSLSPGGGGSGGGGGSGGGGSGGGGSAPTSSSTKKTQLQLEHLLLDLQMILNGINNYKNPKLTRMLTAKFYMPKKATELKHLQCLEEALKPLEEVLNLAQSKNFHFDPRDVVSNINVFVLELKGSETTFMCEYADETATIVEFLNRWITFCQSIISTLT

SEQ ID NO: 149 - protein, 507 aa, Artificial Sequence
  Synthetic IL-2 Fusion protein
PGPVPPSTAVRALIEELINITQNQKAPLCNGSMVWSINRTAGMYCAALESLINVSGCSAIEKTQDMLSGFCPHKVSAGQFSSLHVRSSKIEVAQFVKDLLFHLRTLFREGQFNGGGGSGGGGSGGGGSDKTHTCPPCPAPELLGGPSVFLFPPKPKDTLMISRTPEVTCVVVDVSHEDPEVKFNWYVDGVEVHNAKTKPREEQYASTYRVVSVLTVLHQDWLNGKEYKCKVSNKALPAPIEKTISKAKGQPREPQVYTLPPCREEMTKNQVSLWCLVKGFYPSDIAVEWESNGQPENNYKTTPPVLDSDGSFFLYSKLTVDKSRWQQGNVFSCSVMHEALHNHYTQKSLSLSPGGGGSGGGGGSGGGGSGGGGSAPTSSSTKKTQLQLEHLLLDLQMILNGINNYKNPKLTRMLTFKFYMPKKATELKHLQCLEEELKPLEEVLNLAQSKNFHFDPRDVVSNINVFVLELKGSETTFMCEYADETATIVEFLNRWITFCQSIISTLT

SEQ ID NO: 150 - protein, 736 aa, Artificial Sequence
  Synthetic IL-2 Fusion protein
APTSSSTKKTQLQLEHLLLDLQMILNGINNYKNPKLTRMLTAKFYMPKKATELKHLQCLEEALKPLEEVLNLAQSKNFHFDPRDVVSNINVFVLELKGSETTFMCEYADETATIVEFLNRWITFCQSIISTLTGGGGSGGGGSGGGGSDKTHTCPPCPAPELLGGPSVFLFPPKPKDTLMISRTPEVTCVVVDVSHEDPEVKFNWYVDGVEVHNAKTKPREEQYASTYRVVSVLAPTSSSTKKTQLQLEHLLLDLQMILNGINNYKNPKLTRMLTAKFYMPKKATELKHLQCLEEALKPLEEVLNLAQSKNFHFDPRDVVSNINVFVLELKGSETTFMCEYADETATIVEFLNRWITFCQSIISTLTGGGGSGGGGSGGGGSDKTHTCPPCPAPELLGGPSVFLFPPKPKDTLMISRTPEVTCVVVDVSHEDPEVKFNWYVDGVEVHNAKTKPREEQYASTYRVVSVLTVLHQDWLNGKEYKCKVSNKALPAPIEKTISKAKGQPREPQVYTLPPSREEMTKNQVSLTCLVKGFYPSDIAVEWESNGQPENNYKTTPPVLDSDGSFFLYSKLTVDKSRWQQGNVFSCSVMHEALHNHYTQKSLSLSPGGGGGSGGGGSGGGGSPGPVPPSTAVRALIEELINITQNQKAPLCNGSMVWSINRTAGMYCAALESLINVSGCSAIEKTQDMLSGFCPHKVSAGQFSSLHVRSSKIEVAQFVKDLLFHLRTLFREGQFN

SEQ ID NO: 151 - protein, 354 aa, Artificial Sequence
  Synthetic Bispecific Fusion Construct
DKTHTCPPCPAPELLGGPSVFLFPPKPKDTLMISRTPEVTCVVVDVSHEDPEVKFNWYVDGVEVHNAKTKPREEQYASTYRVVSVLTVLHQDWLNGKEYKCKVSNKALPAPIEKTISKAKGQPREPQVYTLPPCRDELTKNQVSLWCLVKGFYPSDIAVEWESNGQPENNYKTTPPVLDSDGSFFLYSKLTVDKSRWQQGNVFSCSVMHEALHNHYTQKSLSLSPGGGGGSGGGGSGGGGSPGPVPPSTAHRELIEELVNITQNQKAPLCNGSMVWSINLTAGMYCAALESLINVSGCSAIEKTQRMLSGFCPHKVSAGQFSSLHVTGRKIEVAQFVKDLLLHLKKLFKEGQFN

SEQ ID NO: 152 - protein, 354 aa, Artificial Sequence
  Synthetic Bispecific Fusion Construct
DKTHTCPPCPAPELLGGPSVFLFPPKPKDTLMISRTPEVTCVVVDVSHEDPEVKFNWYVDGVEVHNAKTKPREEQYASTYRVVSVLTVLHQDWLNGKEYKCKVSNKALPAPIEKTISKAKGQPREPQVYTLPPSRDELTKNQVSLTCLVKGFYPSDIAVEWESNGQPENNYKTTPPVLDSDGSFFLYSKLTVDKSRWQQGNVFSCSVMHEALHNHYTQKSLSLSPGGGGGSGGGGSGGGGSPGPVPPSTAVRELIEELINITQNQKAPLCNGSMVWSINRTAGMYCAALESLINVSGCSAIEKTQRMLSGFCPHKVSAGQFSSLHVRSSKIEVAQFVKDLLFHLRTLFREGQFN

SEQ ID NO: 153 - protein, 354 aa, Artificial Sequence
  Synthetic Bispecific Fusion Construct
DKTHTCPPCPAPELLGGPSVFLFPPKPKDTLMISRTPEVTCVVVDVSHEDPEVKFNWYVDGVEVHNAKTKPREEQYASTYRVVSVLTVLHQDWLNGKEYKCKVSNKALPAPIEKTISKAKGQPREPQVYTLPPSRDELTKNQVSLTCLVKGFYPSDIAVEWESNGQPENNYKTTPPVLDSDGSFFLYSKLTVDKSRWQQGNVFSCSVMHEALHNHYTQKSLSLSPGGGGGSGGGGSGGGGSPGPVPPSTAVRELIEELINITQNQKAPLCNGSMVWSINLTAGMYCAALESLINVSGCSAIEKTQRMLSGFCPHKVSAGQFSSLHVRSSKIEVAQFVKDLLFHLRTLFREGQFN

SEQ ID NO: 154 - protein, 354 aa, Artificial Sequence
  Synthetic Bispecific Fusion Construct
DKTHTCPPCPAPELLGGPSVFLFPPKPKDTLMISRTPEVTCVVVDVSHEDPEVKFNWYVDGVEVHNAKTKPREEQYASTYRVVSVLTVLHQDWLNGKEYKCKVSNKALPAPIEKTISKAKGQPREPQVYTLPPSRDELTKNQVSLTCLVKGFYPSDIAVEWESNGQPENNYKTTPPVLDSDGSFFLYSKLTVDKSRWQQGNVFSCSVMHEALHNHYTQKSLSLSPGGGGGSGGGGSGGGGSPGPVPPSTAVRALIEELINITQNQKAPLCNGSMVWSINRTAGMYCAALESLINVSGCSAIEKTQDMLSGFCPHKVSAGQFSSLHVRSSKIEVAQFVKDLLFHLRTLFREGQFN

SEQ ID NO: 155 - protein, 354 aa, Artificial Sequence
  Synthetic Bispecific Fusion Construct
DKTHTCPPCPAPELLGGPSVFLFPPKPKDTLMISRTPEVTCVVVDVSHEDPEVKFNWYVDGVEVHNAKTKPREEQYASTYRVVSVLTVLHQDWLNGKEYKCKVSNKALPAPIEKTISKAKGQPREPQVYTLPPSRDELTKNQVSLTCLVKGFYPSDIAVEWESNGQPENNYKTTPPVLDSDGSFFLYSKLTVDKSRWQQGNVFSCSVMHEALHNHYTQKSLSLSPGGGGGSGGGGSGGGGSPGPVPPSTAVRALIEELINITQNQKAPLCNGSMVWSINLTAGMYCAALESLINVSGCSAIEKTQDMLSGFCPHKVSAGQFSSLHVRSSKIEVAQFVKDLLFHLRTLFREGQFN

SEQ ID NO: 156 - protein, 344 aa, Artificial Sequence
  Synthetic Bispecific Fusion Construct
APPCPSCPAPEFLGGPSVFLFPPKPKDTLMISRTPEVTCVVVDVSQEDPEVQFNWYVDGVEVHNAKTKPREEQFNSTYRVVSVLTVLHQDWLNGKEYKCKVSNKGLPSSIEKTISKAKGQPREPQVYTLPPSQEEMTKNQVSLTCLVKGFYPSDIAVEWESNGQPENNYKTTPPVLDSDGSFFLYSRLTVDKSRWQEGNVFSCSVMHEALHNHYTQKSLSLSPGKGGGSGSPGPVPPSTAVRALIEELINITQNQKAPLCNGSMVWSINRTAGMYCAALESLINVSGCSAIEKTQDMLSGFCPHKVSAGQFSSLHVRSSKIEVAQFVKDLLFHLRTLFREGQFN

SEQ ID NO: 157 - protein, 355 aa, Artificial Sequence
  Synthetic Bispecific Fusion Construct
PGPVPPSTAVRALIEELINITQNQKAPLCNGSMVWSINRTAGMYCAALESLINVSGCSAIEKTQDMLSGFCPHKVSAGQFSSLHVRSSKIEVAQFVKDLLFHLRTLFREGQFNGGGGSGGGGSGGGGSDKTHTCPPCPAPELLGGPSVFLFPPKPKDTLMISRTPEVTCVVVDVSHEDPEVKFNWYVDGVEVHNAKTKPREEQYASTYRVVSVLTVLHQDWLNGKEYKCKVSNKALPAPIEKTISKAKGQPREPQVYTLPPCRDELTKNQVSLWCLVKGFYPSDIAVEWESNGQPENNYKTTPPVLDSDGSFFLYSKLTVDKSRWQQGNVFSCSVMHEALHNHYTQKSLSLSPGK

SEQ ID NO: 158 - protein, 374 aa, Artificial Sequence
  Synthetic Bispecific Fusion Construct
APTSSSTKKTQLQLEHLLLDLQMILNGINNYKNPKLTRMLTFKFYMPKKATELKHLQCLEEELKPLEEVLNLAQSKNFHFDPRDVVSNINVFVLELKGSETTFMCEYADETATIVEFLNRWITFCQSIISTLTGGGGSGGGGSGGGGSDKTHTCPPCPAPELLGGPSVFLFPPKPKDTLMISRTPEVTCVVVDVSHEDPEVKFNWYVDGVEVHNAKTKPREEYASTYRVVSVLTVLHQDWLNGKEYKCKVSNKALPAPIEKTISKAKGQPREPQVYTLPPSREEMTKNQVSLTCLVKGFYPSDIAVEWESNGQPENNYKTTPPVLDSDGSFFLYSKLTVDKSRWQQGNVFSCSVMHEALHNHYTQKSLSLSPGK

SEQ ID NO: 159 - protein, 375 aa, Artificial Sequence; identical to SEQ ID NO: 51
  Synthetic Bispecific Fusion Construct

SEQ ID NO: 160 - protein, 374 aa, Artificial Sequence
  Synthetic Bispecific Fusion Construct
DKTHTCPPCPAPELLGGPSVFLFPPKPKDTLMISRTPEVTCVVVDVSHEDPEVKFNWYVDGVEVHNAKTKPREEQYASTYRVVSVLTVLHQDWLNGKEYKCKVSNKALPAPIEKTISKAKGQPREPQVYTLPPSREEMTKNQVSLTCLVKGFYPSDIAVEWESNGQPENNYKTTPPVLDSDGSFFLYSKLTVDKSRWQQGNVFSCSVMHEALHNHYTQKSLSLSPGGGGGSGGGGSGGGGSAPTSSSTKKTQLQLEHLLLDLQMILNGINNYKNPKLTRMLTFKFYMPKKATELKHLQCLEEELKPLEEVLNLAQSKNFHFDPRDVVSNINVFVLELKGSETTFMCEYADETATIVEFLNRWITFCQSIISTLT

SEQ ID NO: 161 - protein, 502 aa, Artificial Sequence
  Synthetic Bispecific Fusion Construct
APTSSSTKKTQLQLEHLLLDLQMILNGINNYKNPKLTRMLTAKFYMPKKATELKHLQCLEEALKPLEEVLNLAQSKNFHFDPRDVVSNINVFVLELKGSETTFMCEYADETATIVEFLNRWITFSQSIISTLTGGGGSGGGGSGGGGSDKTHTCPPCPAPELLGGPSVFLFPPKPKDTLMISRTPEVTCVVVDVSHEDPEVKFNWYVDGVEVHNAKTKPREEQYASTYRVVSVLTVLHQDWLNGKEYKCKVSNKALPAPIEKTISKAKGQPREPQVYTLPPCRDELTKNQVSLWCLVKGFYPSDIAVEWESNGQPENNYKTTPPVLDSDGSFFLYSKLTVDKSRWQQGNVFSCSVMHEALHNHYTQKSLSLSPGGGGGSGGGGSGGGGSPGPVPPSTAHRELIEELVNITQNQKAPLCNGSMVWSINLTAGMYCAALESLINVSGCSAIEKTQRMLSGFCPHKVSAGQFSSLHVTGRKIEVAQFVKDLLLHLKKLFKEGQFN

SEQ ID NO: 162 - protein, 482 aa, Artificial Sequence
  Synthetic Bispecific Fusion Construct
PGPVPPSTAVRALIEELINITQNQKAPLCNGSMVWSINRTAGMYCAALESLINVSGCSAIEKTQDMLSGFCPHKVSAGQFSSLHVRSSKIEVAQFVKDLLFHLRTLFREGQFNGGGGSGGGGSGGGGSDKTHTCPPCPAPELLGGPSVFLFPPKPKDTLMISRTPEVTCVVVDVSHEDPEVKFNWYVDGVEVHNAKTKPREEQYASTYRVVSVLTVLHQDWLNGKEYKCKVSNKALPAPIEKTISKAKGQPREPQVYTLPPCRDELTKNQVSLWCLVKGFYPSDIAVEWESNGQPENNYKTTPPVLDSDGSFFLYSKLTVDKSRWQQGNVFSCSVMHEALHNHYTQKSLSLSPGGGGGSGGGGSGGGGSPGPVPPSTAHRELIEELVNITQNQKAPLCNGSMVWSINLTAGMYCAALESLINVSGCSAIEKTQRMLSGFCPHKVSAGQFSSLHVTGRKIEVAQFVKDLLLHLKKLFKEGQFN

SEQ ID NO: 163 - protein, 502 aa, Artificial Sequence
  Synthetic Bispecific Fusion Construct
APTSSSTKKTQLQLEHLLLDLQMILNGINNYKNPKLTRMLTAKFYMPKKATELKHLQCLEEALKPLEEVLNLAQSKNFHFDPRDVVSNINVFVLELKGSETTFMCEYADETATIVEFLNRWITFCQSIISTLTGGGGSGGGGSGGGGSDKTHTCPPCPAPELLGGPSVFLFPPKPKDTLMISRTPEVTCVVVDVSHEDPEVKFNWYVDGVEVHNAKTKPREEQYASTYRVVSVLTVLHQDWLNGKEYKCKVSNKALPAPIEKTISKAKGQPREPQVYTLPPSREEMTKNQVSLTCLVKGFYPSDIAVEWESNGQPENNYKTTPPVLDSDGSFFLYSKLTVDKSRWQQGNVFSCSVMHEALHNHYTQKSLSLSPGGGGGSGGGGSGGGGSPGPVPPSTAVRALIEELINITQNQKAPLCNGSMVWSINRTAGMYCAALESLINVSGCSAIEKTQDMLSGFCPHKVSAGQFSSLHVRSSKIEVAQFVKDLLFHLRTLFREGQFN

SEQ ID NO: 164 - protein, 502 aa, Artificial Sequence
  Synthetic Bispecific Fusion Construct
APTSSSTKKTQLQLEHLLLDLQMILNGINNYKNPKLTRMLTAKFYMPKKATELKHLQCLEEALKPLEEVLNLAQSKNFHFDPRDVVSNINVFVLELKGSETTFMCEYADETATIVEFLNRWITFSQSIISTLTGGGGSGGGGSGGGGSDKTHTCPPCPAPELLGGPSVFLFPPKPKDTLMISRTPEVTCVVVDVSHEDPEVKFNWYVDGVEVHNAKTKPREEQYASTYRVVSVLTVLHQDWLNGKEYKCKVSNKALPAPIEKTISKAKGQPREPQVYTLPPSRDELTKNQVSLTCLVKGFYPSDIAVEWESNGQPENNYKTTPPVLDSDGSFFLYSKLTVDKSRWQQGNVFSCSVMHEALHNHYTQKSLSLSPGGGGGSGGGGSGGGGSPGPVPPSTAVRALIEELINITQNQKAPLCNGSMVWSINRTAGMYCAALESLINVSGCSAIEKTQDMLSGFCPHKVSAGQFSSLHVRSSKIEVAQFVKDLLFHLRTLFREGQFN

SEQ ID NO: 165 - protein, 507 aa, Artificial Sequence
  Synthetic Bispecific Fusion Construct
PGPVPPSTAHRELIEELVNITQNQKAPLCNGSMVWSINLTAGMYCAALESLINVSGCSAIEKTQRMLSGFCPHKVSAGQFSSLHVTGRKIEVAQFVKDLLLHLKKLFKEGQFNGGGGSGGGGSGGGGSDKTHTCPPCPAPELLGGPSVFLFPPKPKDTLMISRTPEVTCVVVDVSHEDPEVKFNWYVDGVEVHNAKTKPREEQYASTYRVVSVLTVLHQDWLNGKEYKCKVSNKALPAPIEKTISKAKGQPREPQVYTLPPCREEMTKNQVSLWCLVKGFYPSDIAVEWESNGQPENNYKTTPPVLDSDGSFFLYSKLTVDKSRWQQGNVFSCSVMHEALHNHYTQKSLSLSPGGGGSGGGGGSGGGGSGGGGSAPTSSSTKKTQLQLEHLLLDLQMILNGINNYKNPKLTRMLTFKFYMPKKATELKHLQCLEEELKPLEEVLNLAQSKNFHFDPRDVVSNINVFVLELKGSETTFMCEYADETATIVEFLNRWITFCQSIISTLT

SEQ ID NO: 166 - protein, 507 aa, Artificial Sequence; identical to SEQ ID NO: 149
  Synthetic Bispecific Fusion Construct

SEQ ID NO: 167 - protein, 507 aa, Artificial Sequence; identical to SEQ ID NO: 148
  Synthetic Bispecific Fusion Construct

SEQ ID NO: 168 - protein, 354 aa, Artificial Sequence; identical to SEQ ID NO: 154
  Synthetic Bispecific Fusion Construct

SEQ ID NO: 169 - protein, 354 aa, Artificial Sequence
  Synthetic Bispecific Fusion Construct
DKTHTCPPCPAPELLGGPSVFLFPPKPKDTLMISRTPEVTCVVVDVSHEDPEVKFNWYVDGVEVHNAKTKPREEQYASTYRVVSVLTVLHQDWLNGKEYKCKVSNKALPAPIEKTISKAKGQPREPQVYTLPPSRDELTKNQVSLTCLVKGFYPSDIAVEWESNGQPENNYKTTPPVLDSDGSFFLYSKLTVDKSRWQQGNVFSCSVMHEALHNHYTQKSLSLSPGGGGGSGGGGSGGGGSPGPVPPSTAHRELIEELVNITQNQKAPLCNGSMVWSINLTAGMYCAALESLINVSGCSAIEKTQRMLSGFCPHKVSAGQFSSLHVTGRKIEVAQFVKDLLLHLKKLFKEGQFN

SEQ ID NO: 170 - protein, 354 aa, Artificial Sequence
  Synthetic Bispecific Fusion Construct
DKTHTCPPCPAPELLGGPSVFLFPPKPKDTLMISRTPEVTCVVVDVSHEDPEVKFNWYVDGVEVHNAKTKPREEQYASTYRVVSVLTVLHQDWLNGKEYKCKVSNKALPAPIEKTISKAKGQPREPQVYTLPPSRDELTKNQVSLTCLVKGFYPSDIAVEWESNGQPENNYKTTPPVLDSDGSFFLYSKLTVDKSRWQQGNVFSCSVMHEALHNHYTQKSLSLSPGGGGGSGGGGSGGGGSPGPVPPSTAHRELIEELVNITQNQKAPLCNGSMVWSINRTAGMYCAALESLINVSGCSAIEKTQRMLSGFCPHKVSAGQFSSLHVTGRKIEVAQFVKDLLLHLKKLFKEGQFN

SEQ ID NO: 171 - protein, 226 aa, Artificial Sequence
  Synthetic Bispecific Fusion Construct
DKTHTCPPCPAPELLGGPSVFLFPPKPKDTLMISRTPEVTCVVVDVSHEDPEVKFNWYVDGVEVHNAKTKPREEQYASTYRVVSVLTVLHQDWLNGKEYKCKVSNKALPAPIEKTISKAKGQPREPQVCTLPPSRDELTKNQVSLSCAVKGFYPSDIAVEWESNGQPENNYKTTPPVLDSDGSFFLVSKLTVDKSRWQQGNVFSCSVMHEALHNHYTQKSLSLSPG

SEQ ID NO: 172 - protein, 502 aa, Artificial Sequence; identical to SEQ ID NO: 164
  Synthetic Bispecific Fusion Construct

SEQ ID NO: 173 - protein, 502 aa, Artificial Sequence
  Synthetic Bispecific Fusion Construct
APTSSSTKKTQLQLEHLLLDLQMILNGINNYKNPKLTRMLTAKFYMPKKATELKHLQCLEEALKPLEEVLNLAQSKNFHFDPRDVVSNINVFVLELKGSETTFMCEYADETATIVEFLNRWITFCQSIISTLTGGGGSGGGGSGGGGSDKTHTCPPCPAPELLGGPSVFLFPPKPKDTLMISRTPEVTCVVVDVSHEDPEVKFNWYVDGVEVHNAKTKPREEQYASTYRVVSVLTVLHQDWLNGKEYKCKVSNKALPAPIEKTISKAKGQPREPQVYTLPPSRDELTKNQVSLTCLVKGFYPSDIAVEWESNGQPENNYKTTPPVLDSDGSFFLYSKLTVDKSRWQQGNVFSCSVMHEALHNHYTQKSLSLSPGGGGGSGGGGSGGGGSPGPVPPSTAVRALIEELINITQNQKAPLCNGSMVWSINRTAGMYCAALESLINVSGCSAIEKTQDMLSGFCPHKVSAGQFSSLHVRSSKIEVAQFVKDLLFHLRTLFREGQFN

SEQ ID NO: 174 - protein, 502 aa, Artificial Sequence
  Synthetic Bispecific Fusion Construct
PGPVPPSTAHRELIEELVNITQNQKAPLCNGSMVWSINLTAGMYCAALESLINVSGCSAIEKTQRMLSGFCPHKVSAGQFSSLHVTGRKIEVAQFVKDLLLHLKKLFKEGQFNGGGGSGGGGSGGGGSDKTHTCPPCPAPELLGGPSVFLFPPKPKDTLMISRTPEVTCVVVDVSHEDPEVKFNWYVDGVEVHNAKTKPREEQYASTYRVVSVLTVLHQDWLNGKEYKCKVSNKALPAPIEKTISKAKGQPREPQVYTLPPSRDELTKNQVSLTCLVKGFYPSDIAVEWESNGQPENNYKTTPPVLDSDGSFFLYSKLTVDKSRWQQGNVFSCSVMHEALHNHYTQKSLSLSPGGGGGSGGGGSGGGGSAPTSSSTKKTQLQLEHLLLDLQMILNGINNYKNPKLTRMLTFKFYMPKKATELKHLQCLEEELKPLEEVLNLAQSKNFHFDPRDVVSNINVFVLELKGSETTFMCEYADETATIVEFLNRWITFSQSIISTLT

SEQ ID NO: 175 - protein, 502 aa, Artificial Sequence
  Synthetic Bispecific Fusion Construct
PGPVPPSTAHRELIEELVNITQNQKAPLCNGSMVWSINLTAGMYCAALESLINVSGCSAIEKTQRMLSGFCPHKVSAGQFSSLHVTGRKIEVAQFVKDLLLHLKKLFKEGQFNGGGGSGGGGSGGGGSDKTHTCPPCPAPELLGGPSVFLFPPKPKDTLMISRTPEVTCVVVDVSHEDPEVKFNWYVDGVEVHNAKTKPREEQYASTYRVVSVLTVLHQDWLNGKEYKCKVSNKALPAPIEKTISKAKGQPREPQVYTLPPSRDELTKNQVSLTCLVKGFYPSDIAVEWESNGQPENNYKTTPPVLDSDGSFFLYSKLTVDKSRWQQGNVFSCSVMHEALHNHYTQKSLSLSPGGGGGSGGGGSGGGGSAPTSSSTKKTQLQLEHLLLDLQMILNGINNYKNPKLTRMLTFKFYMPKKATELKHLQCLEEELKPLEEVLNLAQSKNFHFDPRDVVSNINVFVLELKGSETTFMCEYADETATIVEFLNRWITFCQSIISTLT

SEQ ID NO: 176 - protein, 502 aa, Artificial Sequence
  Synthetic Bispecific Fusion Construct
PGPVPPSTAHRELIEELVNITQNQKAPLCNGSMVWSINRTAGMYCAALESLINVSGCSAIEKTQRMLSGFCPHKVSAGQFSSLHVTGRKIEVAQFVKDLLLHLKKLFKEGQFNGGGGSGGGGSGGGGSDKTHTCPPCPAPELLGGPSVFLFPPKPKDTLMISRTPEVTCVVVDVSHEDPEVKFNWYVDGVEVHNAKTKPREEQYASTYRVVSVLTVLHQDWLNGKEYKCKVSNKALPAPIEKTISKAKGQPREPQVYTLPPSRDELTKNQVSLTCLVKGFYPSDIAVEWESNGQPENNYKTTPPVLDSDGSFFLYSKLTVDKSRWQQGNVFSCSVMHEALHNHYTQKSLSLSPGGGGGSGGGGSGGGGSAPTSSSTKKTQLQLEHLLLDLQMILNGINNYKNPKLTRMLTFKFYMPKKATELKHLQCLEEELKPLEEVLNLAQSKNFHFDPRDVVSNINVFVLELKGSETTFMCEYADETATIVEFLNRWITFSQSIISTLT

SEQ ID NO: 177 - protein, 502 aa, Artificial Sequence
  Synthetic Bispecific Fusion Construct
PGPVPPSTAHRELIEELVNITQNQKAPLCNGSMVWSINRTAGMYCAALESLINVSGCSAIEKTQRMLSGFCPHKVSAGQFSSLHVTGRKIEVAQFVKDLLLHLKKLFKEGQFNGGGGSGGGGSGGGGSDKTHTCPPCPAPELLGGPSVFLFPPKPKDTLMISRTPEVTCVVVDVSHEDPEVKFNWYVDGVEVHNAKTKPREEQYASTYRVVSVLTVLHQDWLNGKEYKCKVSNKALPAPIEKTISKAKGQPREPQVYTLPPSRDELTKNQVSLTCLVKGFYPSDIAVEWESNGQPENNYKTTPPVLDSDGSFFLYSKLTVDKSRWQQGNVFSCSVMHEALHNHYTQKSLSLSPGGGGGSGGGGSGGGGSAPTSSSTKKTQLQLEHLLLDLQMILNGINNYKNPKLTRMLTFKFYMPKKATELKHLQCLEEELKPLEEVLNLAQSKNFHFDPRDVVSNINVFVLELKGSETTFMCEYADETATIVEFLNRWITFCQSIISTLT

SEQ ID NO: 178 - protein, 227 aa, Artificial Sequence
  Synthetic Bispecific Fusion Construct
DKTHTCPPCPAPELLGGPSVFLFPPKPKDTLMISRTPEVTCVVVDVSHEDPEVKFNWYVDGVEVHNAKTKPREEQYASTYRVVSVLTVLHQDWLNGKEYKCKVSNKALPAPIEKTISKAKGQPREPQVCTLPPSREEMTKNQVSLSCAVKGFYPSDIAVEWESNGQPENNYKTTPPVLDSDGSFFLVSKLTVDKSRWQQGNVFSCSVMHEALHNHYTQKSLSLSPGK

SEQ ID NO: 179 - protein, 344 aa, Artificial Sequence; identical to SEQ ID NO: 156
  Synthetic Bispecific Fusion Construct

SEQ ID NO: 180 - protein, 507 aa, Artificial Sequence; identical to SEQ ID NO: 149
  Synthetic Bispecific Fusion Construct

SEQ ID NO: 181 - protein, 227 aa, Artificial Sequence; identical to SEQ ID NO: 178
  Synthetic Bispecific Fusion Construct

SEQ ID NO: 182 - protein, 354 aa, Artificial Sequence; identical to SEQ ID NO: 155
  Synthetic Bispecific Fusion Construct

SEQ ID NO: 183 - protein, 354 aa, Artificial Sequence
  Synthetic Bispecific Fusion Construct
PGPVPPSTAHRELIEELVNITQNQKAPLCNGSMVWSINLTAGMYCAALESLINVSGCSAIEKTQRMLSGFCPHKVSAGQFSSLHVTGRKIEVAQFVKDLLLHLKKLFKEGRFNGGGGSGGGGSGGGGSDKTHTCPPCPAPELLGGPSVFLFPPKPKDTLMISRTPEVTCVVVDVSHEDPEVKFNWYVDGVEVHNAKTKPREEQYASTYRVVSVLTVLHQDWLNGKEYKCKVSNKALPAPIEKTISKAKGQPREPQVYTLPPSRDELTKNQVSLTCLVKGFYPSDIAVEWESNGQPENNYKTTPPVLDSDGSFFLYSKLTVDKSRWQQGNVFSCSVMHEALHNHYTQKSLSLSPG

SEQ ID NO: 184 - protein, 226 aa, Artificial Sequence
  Synthetic Bispecific Fusion Construct
DKTHTCPPCPAPELLGGPSVFLFPPKPKDTLMISRTPEVTCVVVDVSHEDPEVKFNWYVDGVEVHNAKTKPREEQYASTYRVVSVLTVLHQDWLNGKEYKCKVSNKALPAPIEKTISKAKGQPREPQVYTLPPSRDELTKNQVSLTCLVKGFYPSDIAVEWESNGQPENNYKTTPPVLDSDGSFFLYSKLTVDKSRWQQGNVFSCSVMHEALHNHYTQKSLSLSPG

SEQ ID NO: 185 - protein, 354 aa, Artificial Sequence
  Synthetic Bispecific Fusion Construct
DKTHTCPPCPAPELLGGPSVFLFPPKPKDTLMISRTPEVTCVVVDVSHEDPEVKFNWYVDGVEVHNAKTKPREEQYASTYRVVSVLTVLHQDWLNGKEYKCKVSNKALPAPIEKTISKAKGQPREPQVYTLPPSRDELTKNQVSLTCLVKGFYPSDIAVEWESNGQPENNYKTTPPVLDSDGSFFLYSKLTVDKSRWQQGNVFSCSVMHEALHNHYTQKSLSLSPGGGGGSGGGGSGGGGSPGPVPPSTAHRELIEELVNITQNQKAPLCNGSMVWSINLTAGMYCAALESLINVSGCSAIEKTQRMLSGFCPHKVSAGQFSSLHVTGRKIEVAQFVKDLLLHLKKLFKEGRFN

SEQ ID NO: 186 - protein, 354 aa, Artificial Sequence
  Synthetic Bispecific Fusion Construct
DKTHTCPPCPAPELLGGPSVFLFPPKPKDTLMISRTPEVTCVVVDVSHEDPEVKFNWYVDGVEVHNAKTKPREEQYASTYRVVSVLTVLHQDWLNGKEYKCKVSNKALPAPIEKTISKAKGQPREPQVYTLPPSRDELTKNQVSLTCLVKGFYPSDIAVEWESNGQPENNYKTTPPVLDSDGSFFLYSKLTVDKSRWQQGNVFSCSVMHEALHNHYTQKSLSLSPGGGGGSGGGGSGGGGSPGPVPPSTAVRALIEELINITQNQKAPLCNGSMVWSINLTAGMYCAALESLINVSGCSAIEKTQDMLSGFCPHKVSAGQFSSLHVRSSKIEVAQFVKDLLFHLRTLFREGRFN

SEQ ID NO: 187 - protein, 482 aa, Artificial Sequence
  Synthetic Bispecific Fusion Construct
PGPVPPSTAVRALIEELINITQNQKAPLCNGSMVWSINLTAGMYCAALESLINVSGCSAIEKTQDMLSGFCPHKVSAGQFSSLHVRSSKIEVAQFVKDLLFHLRTLFREGQFNGGGGSGGGGSGGGGSDKTHTCPPCPAPELLGGPSVFLFPPKPKDTLMISRTPEVTCVVVDVSHEDPEVKFNWYVDGVEVHNAKTKPREEQYASTYRVVSVLTVLHQDWLNGKEYKCKVSNKALPAPIEKTISKAKGQPREPQVYTLPPSRDELTKNQVSLTCLVKGFYPSDIAVEWESNGQPENNYKTTPPVLDSDGSFFLYSKLTVDKSRWQQGNVFSCSVMHEALHNHYTQKSLSLSPGGGGGSGGGGSGGGGSPGPVPPSTAVRALIEELINITQNQKAPLCNGSMVWSINLTAGMYCAALESLINVSGCSAIEKTQDMLSGFCPHKVSAGQFSSLHVRSSKIEVAQFVKDLLFHLRTLFREGQFN

SEQ ID NO: 188 - protein, 502 aa, Artificial Sequence
  Synthetic Bispecific Fusion Construct
APTSSSTKKTQLQLEHLLLDLQMILNGINNYKNPKLTRMLTAKFYMPKKATELKHLQCLEEALKPLEEVLNLASSKNFHFTPRDVVSNINVFVLELKGSETTFMCEYADETATIVEFLNRWITFSQSIISTLTGGGGSGGGGSGGGGSDKTHTCPPCPAPELLGGPSVFLFPPKPKDTLMISRTPEVTCVVVDVSHEDPEVKFNWYVDGVEVHNAKTKPREEQYASTYRVVSVLTVLHQDWLNGKEYKCKVSNKALPAPIEKTISKAKGQPREPQVYTLPPSRDELTKNQVSLTCLVKGFYPSDIAVEWESNGQPENNYKTTPPVLDSDGSFFLYSKLTVDKSRWQQGNVFSCSVMHEALHNHYTQKSLSLSPGGGGGSGGGGSGGGGSPGPVPPSTAVRALIEELINITQNQKAPLCNGSMVWSINLTAGMYCAALESLINVSGCSAIEKTQDMLSGFCPHKVSAGQFSSLHVRSSKIEVAQFVKDLLFHLRTLFREGQFN

SEQ ID NO: 189 - protein, 457 aa, Artificial Sequence
  Synthetic Bispecific Fusion Construct
ASTKGPSVFPLAPSSKSTSGGTAALGCLVKDYFPEPVTVSWNSGALTSGVHTFPAVLQSSGLYSLSSVVTVPSSSLGTQTYICNVNHKPSNTKVDKKVEPKSCDKTHTCPPCPAPELLGGPSVFLFPPKPKDTLMISRTPEVTCVVVDVSHEDPEVKFNWYVDGVEVHNAKTKPREEQYASTYRVVSVLTVLHQDWLNGKEYKCKVSNKALPAPIEKTISKAKGQPREPQVYTLPPCRDELTKNQVSLWCLVKGFYPSDIAVEWESNGQPENNYKTTPPVLDSDGSFFLYSKLTVDKSRWQQGNVFSCSVMHEALHNHYTQKSLSLSPGGGGGSGGGGSGGGGSPGPVPPSTAHRELIEELVNITQNQKAPLCNGSMVWSINLTAGMYCAALESLINVSGCSAIEKTQRMLSGFCPHKVSAGQFSSLHVTGRKIEVAQFVKDLLLHLKKLFKEGQFN

SEQ ID NO: 190 - protein, 330 aa, Artificial Sequence
  Synthetic Bispecific Fusion Construct
ASTKGPSVFPLAPSSKSTSGGTAALGCLVKDYFPEPVTVSWNSGALTSGVHTFPAVLQSSGLYSLSSVVTVPSSSLGTQTYICNVNHKPSNTKVDKKVEPKSCDKTHTCPPCPAPELLGGPSVFLFPPKPKDTLMISRTPEVTCVVVDVSHEDPEVKFNWYVDGVEVHNAKTKPREEQYASTYRVVSVLTVLHQDWLNGKEYKCKVSNKALPAPIEKTISKAKGQPREPQVCTLPPSRDELTKNQVSLSCAVKGFYPSDIAVEWESNGQPENNYKTTPPVLDSDGSFFLVSKLTVDKSRWQQGNVFSCSVMHEALHNHYTQKSLSLSPGK

SEQ ID NO: 191 - protein, 107 aa, Artificial Sequence [sequence omitted]

SEQ ID NO: 192 - protein, 457 aa, Artificial Sequence; identical to SEQ ID NO: 189
  Synthetic Bispecific Fusion Construct

SEQ ID NO: 193 - protein, 330 aa, Artificial Sequence; identical to SEQ ID NO: 190
  Synthetic Bispecific Fusion Construct

SEQ ID NO: 194 - protein, 107 aa, Artificial Sequence [sequence omitted]

SEQ ID NO: 195 - protein, 457 aa, Artificial Sequence; identical to SEQ ID NO: 189
  Synthetic Bispecific Fusion Construct

SEQ ID NO: 196 - protein, 330 aa, Artificial Sequence; identical to SEQ ID NO: 190
  Synthetic Bispecific Fusion Construct

SEQ ID NO: 197 - protein, 107 aa, Artificial Sequence [sequence omitted]

SEQ ID NO: 198 - protein, 457 aa, Artificial Sequence; identical to SEQ ID NO: 189
  Synthetic Bispecific Fusion Construct

SEQ ID NO: 199 - protein, 330 aa, Artificial Sequence; identical to SEQ ID NO: 190
  Synthetic Bispecific Fusion Construct

SEQ ID NO: 200 - protein, 107 aa, Artificial Sequence [sequence omitted]

SEQ ID NO: 201 - protein, 477 aa, Artificial Sequence
  Synthetic Bispecific Fusion Construct
ASTKGPSVFPLAPSSKSTSGGTAALGCLVKDYFPEPVTVSWNSGALTSGVHTFPAVLQSSGLYSLSSVVTVPSSSLGTQTYICNVNHKPSNTKVDKKVEPKSCDKTHTCPPCPAPELLGGPSVFLFPPKPKDTLMISRTPEVTCVVVDVSHEDPEVKFNWYVDGVEVHNAKTKPREEQYASTYRVVSVLTVLHQDWLNGKEYKCKVSNKALPAPIEKTISKAKGQPREPQVYTLPPCRDELTKNQVSLWCLVKGFYPSDIAVEWESNGQPENNYKTTPPVLDSDGSFFLYSKLTVDKSRWQQGNVFSCSVMHEALHNHYTQKSLSLSPGGGGGSGGGGSGGGGSAPTSSSTKKTQLQLEHLLLDLQMILNGINNYKNPKLTRMLTAKFYMPKKATELKHLQCLEEALKPLEEVLNLAQSKNFHFDPRDVVSNINVFVLELKGSETTFMCEYADETATIVEFLNRWITFSQSIISTLT

SEQ ID NO: 202 - protein, 330 aa, Artificial Sequence; identical to SEQ ID NO: 190
  Synthetic Bispecific Fusion Construct

SEQ ID NO: 203 - protein, 107 aa, Artificial Sequence [sequence omitted]

SEQ ID NO: 204 - protein, 477 aa, Artificial Sequence; identical to SEQ ID NO: 201
  Synthetic Bispecific Fusion Construct

SEQ ID NO: 205 - protein, 330 aa, Artificial Sequence; identical to SEQ ID NO: 190
  Synthetic Bispecific Fusion Construct

SEQ ID NO: 206 - protein, 107 aa, Artificial Sequence [sequence omitted]

SEQ ID NO: 207 - protein, 458 aa, Artificial Sequence
  Synthetic Bispecific Fusion Construct
ASTKGPSVFPLAPSSKSTSGGTAALGCLVKDYFPEPVTVSWNSGALTSGVHTFPAVLQSSGLYSLSSVVTVPSSSLGTQTYICNVNHKPSNTKVDKKVEPKSCDKTHTCPPCPAPELLGGPSVFLFPPKPKDTLMISRTPEVTCVVVDVSHEDPEVKFNWYVDGVEVHNAKTKPREEQYASTYRVVSVLTVLHQDWLNGKEYKCKVSNKALPAPIEKTISKAKGQPREPQVYTLPPSRDELTKNQVSLTCLVKGFYPSDIAVEWESNGQPENNYKTTPPVLDSDGSFFLYSKLTVDKSRWQQGNVFSCSVMHEALHNHYTQKSLSLSPGKGGGGSGGGGSGGGGSPGPVPPSTAVRALIEELINITQNQKAPLCNGSMVWSINRTAGMYCAALESLINVSGCSAIEKTQDMLSGFCPHKVSAGQFSSLHVRSSKIEVAQFVKDLLFHLRTLFREGQFN

SEQ ID NO: 208 - protein, 107 aa, Artificial Sequence [sequence omitted]

SEQ ID NO: 209 - protein, 458 aa, Artificial Sequence; identical to SEQ ID NO: 207
  Synthetic Bispecific Fusion Construct

SEQ ID NO: 210 - protein, 107 aa, Artificial Sequence [sequence omitted]

SEQ ID NO: 211 - protein, 354 aa, Artificial Sequence
  Synthetic Bispecific Fusion Construct
PGPVPPSTAVRALIEELINITQNQKAPLCNGSMVWSINRTAGMYCAALESLINVSGCSAIEKTQDMLSGFCPHKVSAGQFSSLHVRSSKIEVAQFVKDLLFHLRTLFREGQFNGGGGSGGGGSGGGGSDKTHTCPPCPAPELLGGPSVFLFPPKPKDTLMISRTPEVTCVVVDVSHEDPEVKFNWYVDGVEVHNAKTKPREEQYASTYRVVSVLTVLHQDWLNGKEYKCKVSNKALPAPIEKTISKAKGQPREPQVYTLPPSRDELTKNQVSLTCLVKGFYPSDIAVEWESNGQPENNYKTTPPVLDSDGSFFLYSKLTVDKSRWQQGNVFSCSVMHEALHNHYTQKSLSLSPG

SEQ ID NO: 212 - protein, 226 aa, Artificial Sequence; identical to SEQ ID NO: 171
  Synthetic Bispecific Fusion Construct

SEQ ID NO: 213 - protein, 227 aa, Artificial Sequence; identical to SEQ ID NO: 178
  Synthetic Bispecific Fusion Construct

SEQ ID NO: 214 - protein, 226 aa, Artificial Sequence; identical to SEQ ID NO: 171
  Synthetic Bispecific Fusion Construct

SEQ ID NO: 215 - protein, 374 aa, Artificial Sequence
  Synthetic Bispecific Fusion Construct
APTSSSTKKTQLQLEHLLLDLQMILNGINNYKNPKLTRMLTAKFYMPKKATELKHLQCLEEALKPLEEVLNLAQSKNFHFDPRDVVSNINVFVLELKGSETTFMCEYADETATIVEFLNRWITFSQSIISTLTGGGGSGGGGSGGGGSDKTHTCPPCPAPELLGGPSVFLFPPKPKDTLMISRTPEVTCVVVDVSHEDPEVKFNWYVDGVEVHNAKTKPREEQYASTYRVVSVLTVLHQDWLNGKEYKCKVSNKALPAPIEKTISKAKGQPREPQVCTLPPSRDELTKNQVSLSCAVKGFYPSDIAVEWESNGQPENNYKTTPPVLDSDGSFFLVSKLTVDKSRWQQGNVFSCSVMHEALHNHYTQKSLSLSPG

SEQ ID NO: 216 - protein, 354 aa, Artificial Sequence
  Synthetic Bispecific Fusion Construct
PGPVPPSTAVRALIEELINITQNQKAPLCNGSMVWSINRTAGMYCAALESLINVSGCSAIEKTQDMLSGFCPHKVSAGQFSSLHVRSSKIEVAQFVKDLLFHLRTLFREGQFNGGGGSGGGGSGGGGSDKTHTCPPCPAPELLGGPSVFLFPPKPKDTLMISRTPEVTCVVVDVSHEDPEVKFNWYVDGVEVHNAKTKPREEQYASTYRVVSVLTVLHQDWLNGKEYKCKVSNKALPAPIEKTISKAKGQPREPQVCTLPPSRDELTKNQVSLSCAVKGFYPSDIAVEWESNGQPENNYKTTPPVLDSDGSFFLVSKLTVDKSRWQQGNVFSCSVMHEALHNHYTQKSLSLSPG

SEQ ID NO: 217 - protein, 227 aa, Artificial Sequence; identical to SEQ ID NO: 178
  Synthetic Bispecific Fusion Construct

SEQ ID NO: 218 - protein, 354 aa, Artificial Sequence; identical to SEQ ID NO: 154
  Synthetic Bispecific Fusion Construct

SEQ ID NO: 219 - protein, 354 aa, Artificial Sequence; identical to SEQ ID NO: 151
  Synthetic Bispecific Fusion Construct

SEQ ID NO: 220 - protein, 354 aa, Artificial Sequence; identical to SEQ ID NO: 185
  Synthetic Bispecific Fusion Construct

SEQ ID NO: 221 - protein, 226 aa, Artificial Sequence; identical to SEQ ID NO: 171
  Synthetic Bispecific Fusion Construct

SEQ ID NO: 222 - protein, 226 aa, Artificial Sequence; identical to SEQ ID NO: 171
  Synthetic Bispecific Fusion Construct

SEQ ID NO: 223 - protein, 502 aa, Artificial Sequence; identical to SEQ ID NO: 173
  Synthetic Bispecific Fusion Construct

SEQ ID NO: 224 - protein, 502 aa, Artificial Sequence; identical to SEQ ID NO: 175
  Synthetic Bispecific Fusion Construct

SEQ ID NO: 225 - protein, 227 aa, Artificial Sequence; identical to SEQ ID NO: 178
  Synthetic Bispecific Fusion Construct

SEQ ID NO: 226 - protein, 507 aa, Artificial Sequence; identical to SEQ ID NO: 165
  Synthetic Bispecific Construct

SEQ ID NO: 227 - protein, 227 aa, Artificial Sequence; identical to SEQ ID NO: 178
  Synthetic Bispecific Construct

SEQ ID NO: 228 - protein, 507 aa, Artificial Sequence; identical to SEQ ID NO: 149
  Synthetic Bispecific Construct

SEQ ID NO: 229 - protein, 227 aa, Artificial Sequence; identical to SEQ ID NO: 178
  Synthetic Bispecific Construct

SEQ ID NO: 230 - protein, 502 aa, Artificial Sequence; identical to SEQ ID NO: 163
  Synthetic Bispecific Construct

SEQ ID NO: 231 - protein, 354 aa, Artificial Sequence; identical to SEQ ID NO: 154
  Synthetic Bispecific Fusion Construct

SEQ ID NO: 232 - protein, 354 aa, Artificial Sequence; identical to SEQ ID NO: 151
  Synthetic Bispecific Fusion Construct

SEQ ID NO: 233 - protein, 354 aa, Artificial Sequence; identical to SEQ ID NO: 185
  Synthetic Bispecific Fusion Construct

SEQ ID NO: 234 - protein, 226 aa, Artificial Sequence; identical to SEQ ID NO: 171
  Synthetic Bispecific Fusion Construct

SEQ ID NO: 235 - protein, 226 aa, Artificial Sequence; identical to SEQ ID NO: 171
  Synthetic Bispecific Fusion Construct

SEQ ID NO: 236 - protein, 502 aa, Artificial Sequence; identical to SEQ ID NO: 173
  Synthetic Bispecific Fusion Construct

SEQ ID NO: 237 - protein, 502 aa, Artificial Sequence; identical to SEQ ID NO: 175
  Synthetic Bispecific Fusion Construct

SEQ ID NO: 238 - protein, 227 aa, Artificial Sequence; identical to SEQ ID NO: 178
  Synthetic Bispecific Fusion Construct

SEQ ID NO: 239 - protein, 354 aa, Artificial Sequence; identical to SEQ ID NO: 151
  Synthetic Bispecific Construct

SEQ ID NO: 240 - protein, 226 aa, Artificial Sequence; identical to SEQ ID NO: 171
  Synthetic Bispecific Construct

SEQ ID NO: 241 - protein, 354 aa, Artificial Sequence; identical to SEQ ID NO: 154
  Synthetic Bispecific Construct

SEQ ID NO: 242 - protein, 482 aa, Artificial Sequence; identical to SEQ ID NO: 162
  Synthetic Bispecific Construct

SEQ ID NO: 243 - protein, 354 aa, Artificial Sequence; identical to SEQ ID NO: 216
  Synthetic Bispecific Construct

SEQ ID NO: 244 - protein, 502 aa, Artificial Sequence; identical to SEQ ID NO: 173
  Synthetic Bispecific Construct

SEQ ID NO: 245 - protein, 344 aa, Artificial Sequence; identical to SEQ ID NO: 156
  Synthetic Bispecific Construct

SEQ ID NO: 246 - protein, 502 aa, Artificial Sequence; identical to SEQ ID NO: 175
  Synthetic Bispecific Construct

SEQ ID NO: 247 - protein, 227 aa, Artificial Sequence; identical to SEQ ID NO: 178
  Synthetic Bispecific Construct

SEQ ID NO: 248 - protein, 507 aa, Artificial Sequence; identical to SEQ ID NO: 149
  Synthetic Bispecific Construct

SEQ ID NO: 249 - protein, 227 aa, Artificial Sequence; identical to SEQ ID NO: 178
  Synthetic Bispecific Construct

SEQ ID NO: 250 - protein, 354 aa, Artificial Sequence; identical to SEQ ID NO: 155
  Synthetic Bispecific Construct

SEQ ID NO: 251 - protein, 354 aa, Artificial Sequence; identical to SEQ ID NO: 183
  Synthetic Bispecific Construct

SEQ ID NO: 252 - protein, 226 aa, Artificial Sequence; identical to SEQ ID NO: 184
  Synthetic Bispecific Construct

SEQ ID NO: 253 - protein, 354 aa, Artificial Sequence; identical to SEQ ID NO: 185
  Synthetic Bispecific Construct

SEQ ID NO: 254 - protein, 354 aa, Artificial Sequence; identical to SEQ ID NO: 186
  Synthetic Bispecific Construct

SEQ ID NO: 255 - protein, 354 aa, Artificial Sequence; identical to SEQ ID NO: 185
  Synthetic Bispecific Construct

SEQ ID NO: 256 - protein, 226 aa, Artificial Sequence; identical to SEQ ID NO: 171
  Synthetic Bispecific Construct

SEQ ID NO: 257 - protein, 482 aa, Artificial Sequence; identical to SEQ ID NO: 187
  Synthetic Bispecific Construct

SEQ ID NO: 258 - protein, 502 aa, Artificial Sequence; identical to SEQ ID NO: 188
  Synthetic Bispecific Construct

SEQ ID NO: 259 - protein, 457 aa, Artificial Sequence; identical to SEQ ID NO: 189
  Synthetic Bispecific Construct

SEQ ID NO: 260 - protein, 330 aa, Artificial Sequence; identical to SEQ ID NO: 190
  Synthetic Bispecific Construct

SEQ ID NO: 261 - protein, 107 aa, Artificial Sequence [sequence omitted]

SEQ ID NO: 262 - protein, 457 aa, Artificial Sequence; identical to SEQ ID NO: 189
  Synthetic Bispecific Construct

SEQ ID NO: 263 - protein, 330 aa, Artificial Sequence; identical to SEQ ID NO: 190
  Synthetic Bispecific Construct

SEQ ID NO: 264 - protein, 107 aa, Artificial Sequence [sequence omitted]

SEQ ID NO: 265 - protein, 457 aa, Artificial Sequence; identical to SEQ ID NO: 189
  Synthetic Bispecific Construct

SEQ ID NO: 266 - protein, 330 aa, Artificial Sequence; identical to SEQ ID NO: 190
  Synthetic Bispecific Construct

SEQ ID NO: 267 - protein, 107 aa, Artificial Sequence [sequence omitted]

SEQ ID NO: 268 - protein, 457 aa, Artificial Sequence; identical to SEQ ID NO: 189
  Synthetic Bispecific Construct

SEQ ID NO: 269 - protein, 330 aa, Artificial Sequence; identical to SEQ ID NO: 190
  Synthetic Bispecific Construct

SEQ ID NO: 270 - protein, 107 aa, Artificial Sequence [sequence omitted]

SEQ ID NO: 271 - protein, 477 aa, Artificial Sequence; identical to SEQ ID NO: 201
  Synthetic Bispecific Construct

SEQ ID NO: 272 - protein, 330 aa, Artificial Sequence; identical to SEQ ID NO: 190
  Synthetic Bispecific Construct

SEQ ID NO: 273 - protein, 107 aa, Artificial Sequence [sequence omitted]

SEQ ID NO: 274 - protein, 477 aa, Artificial Sequence; identical to SEQ ID NO: 201
  Synthetic Bispecific Construct

SEQ ID NO: 275 - protein, 330 aa, Artificial Sequence; identical to SEQ ID NO: 190
  Synthetic Bispecific Construct

SEQ ID NO: 276 - protein, 107 aa, Artificial Sequence [sequence omitted]

SEQ ID NO: 277 - protein, 458 aa, Artificial Sequence; identical to SEQ ID NO: 207
  Synthetic Bispecific Construct

SEQ ID NO: 278 - protein, 107 aa, Artificial Sequence [sequence omitted]

SEQ ID NO: 279 - protein, 458 aa, Artificial Sequence; identical to SEQ ID NO: 207
  Synthetic Bispecific Construct

SEQ ID NO: 280 - protein, 107 aa, Artificial Sequence [sequence omitted]

SEQ ID NO: 281 - protein, 354 aa, Artificial Sequence; identical to SEQ ID NO: 211
  Synthetic Bispecific Construct

SEQ ID NO: 282 - protein, 226 aa, Artificial Sequence; identical to SEQ ID NO: 171
  Synthetic Bispecific Construct

SEQ ID NO: 283 - protein, 477 aa, Artificial Sequence
  Synthetic Bispecific Construct
ASTKGPSVFPLAPSSKSTSGGTAALGCLVKDYFPEPVTVSWNSGALTSGVHTFPAVLQSSGLYSLSSVVTVPSSSLGTQTYICNVNHKPSNTKVDKKVEPKSCDKTHTCPPCPAPELLGGPSVFLFPPKPKDTLMISRTPEVTCVVVDVSHEDPEVKFNWYVDGVEVHNAKTKPREEQYASTYRVVSVLTVLHQDWLNGKEYKCKVSNKALPAPIEKTISKAKGQPREPQVYTLPPCRDELTKNQVSLWCLVKGFYPSDIAVEWESNGQPENNYKTTPPVLDSDGSFFLYSKLTVDKSRWQQGNVFSCSVMHEALHNHYTQKSLSLSPGGGGGSGGGGSGGGGSAPTSSSTKKTQLQLEHLLLDLQMILNGINNYKNPKLTRMLTAKFYMPKKATELKHLQCLEEALKPLEEVLNLAQSKNFHFDPRDVVSNINVFVLELKGSETTFMCEYADETATIVEFLNRWITFCQSIISTLT

SEQ ID NO: 284 - protein, 330 aa, Artificial Sequence; identical to SEQ ID NO: 190
  Synthetic Bispecific Construct

SEQ ID NO: 285 - protein, 107 aa, Artificial Sequence [sequence omitted]

SEQ ID NO: 286 - protein, 5 aa, Artificial Sequence
  Synthetic Anti-PD-1 antibody
SYGMH

SEQ ID NO: 287 - protein, 17 aa, Artificial Sequence
  Synthetic Anti-PD-1 antibody
VIWYDGSNKYYADSVKG

SEQ ID NO: 288 - protein, 4 aa, Artificial Sequence
  Synthetic Anti-PD-1 antibody
NVDY

SEQ ID NO: 289 - protein, 11 aa, Artificial Sequence
  Synthetic Anti-PD-1 antibody
RASQSVSSNLA

SEQ ID NO: 290 - protein, 7 aa, Artificial Sequence
  Synthetic Anti-PD-1 antibody
GASTRAT

SEQ ID NO: 291 - protein, 9 aa, Artificial Sequence
  Synthetic Anti-PD-1 antibody
QQYNNWPRT

SEQ ID NO: 292 - protein, 4 aa, Artificial Sequence
  Synthetic Anti-PD-1 antibody
NGDH

SEQ ID NO: 293 - protein, 8 aa, Artificial Sequence
  Synthetic Anti-PD-1 antibody
GFTFSSYG

SEQ ID NO: 294 - protein, 8 aa, Artificial Sequence
  Synthetic Anti-PD-1 antibody
IWYDGSNK

SEQ ID NO: 295 - protein, 6 aa, Artificial Sequence
  Synthetic Anti-PD-1 antibody
ASNVDY

SEQ ID NO: 296 - protein, 6 aa, Artificial Sequence
  Synthetic Anti-PD-1 antibody
QSVSSN

SEQ ID NO: 297 - protein, 3 aa, Artificial Sequence
  Synthetic Anti-PD-1 antibody
GAS

SEQ ID NO: 298 - protein, 9 aa, Artificial Sequence
  Synthetic Anti-PD-1 antibody
QQYNNWPRT

SEQ ID NO: 299 - protein, 6 aa, Artificial Sequence
  Synthetic Anti-PD-1 antibody
ASNGDH

SEQ ID NO: 300 - protein, 113 aa, Artificial Sequence
  Synthetic Anti-PD-1 antibody
QVQLVESGGGVVQPGRSLRLSCAASGFTFSSYGMHWVRQAPGKGLEWVAVIWYDGSNKYYADSVKGRFTISRDNSKNTLYLQMNSLRAEDTAVYYCASNVDYWGQGTLVTVSS

SEQ ID NO: 301 - protein, 107 aa, Artificial Sequence
  Synthetic Anti-PD-1 antibody
EIVMTQSPATLSVSPGERATLSCRASQSVSSNLAWYQQKPGQAPRLLIYGASTRATGIPARFSGSGSGTEFTLTISSLQSEDFAVYYCQQYNNWPRTFGQGTKVEIK

SEQ ID NO: 302 - protein, 113 aa, Artificial Sequence
  Synthetic Anti-PD-1 antibody
QVQLVESGGGVVQPGRSLRLSCAASGFTFSSYGMHWVRQAPGKGLEWVAVIWYDGSNKYYADSVKGRFTISRDNSKNTLYLQMNSLRAEDTAVYYCASNGDHWGQGTLVTVSS

SEQ ID NO: 303 - protein, 440 aa, Artificial Sequence
  Synthetic Anti-PD-1 antibody
QVQLVESGGGVVQPGRSLRLSCAASGFTFSSYGMHWVRQAPGKGLEWVAVIWYDGSNKYYADSVKGRFTISRDNSKNTLYLQMNSLRAEDTAVYYCASNVDYWGQGTLVTVSSASTKGPSVFPLAPCSRSTSESTAALGCLVKDYFPEPVTVSWNSGALTSGVHTFPAVLQSSGLYSLSSVVTVPSSSLGTKTYTCNVDHKPSNTKVDKRVESKYGPPCPPCPAPEFLGGPSVFLFPPKPKDTLMISRTPEVTCVVVDVSQEDPEVQFNWYVDGVEVHNAKTKPREEQFNSTYRVVSVLTVLHQDWLNGKEYKCKVSNKGLPSSIEKTISKAKGQPREPQVYTLPPSQEEMTKNQVSLTCLVKGFYPSDIAVEWESNGQPENNYKTTPPVLDSDGSFFLYSRLTVDKSRWQEGNVFSCSVMHEALHNHYTQKSLSLSLGK

SEQ ID NO: 304 - protein, 214 aa, Artificial Sequence
  Synthetic Anti-PD-1 antibody
EIVMTQSPATLSVSPGERATLSCRASQSVSSNLAWYQQKPGQAPRLLIYGASTRATGIPARFSGSGSGTEFTLTISSLQSEDFAVYYCQQYNNWPRTFGQGTKVEIKRTVAAPSVFIFPPSDEQLKSGTASVVCLLNNFYPREAKVQWKVDNALQSGNSQESVTEQDSKDSTYSLSSTLTLSKADYEKHKVYACEVTHQGLSSPVTKSFNRGEC

SEQ ID NO: 305 - protein, 440 aa, Artificial Sequence
  Synthetic Anti-PD-1 antibody
QVQLVESGGGVVQPGRSLRLSCAASGFTFSSYGMHWVRQAPGKGLEWVAVIWYDGSNKYYADSVKGRFTISRDNSKNTLYLQMNSLRAEDTAVYYCASNGDHWGQGTLVTVSSASTKGPSVFPLAPCSRSTSESTAALGCLVKDYFPEPVTVSWNSGALTSGVHTFPAVLQSSGLYSLSSVVTVPSSSLGTKTYTCNVDHKPSNTKVDKRVESKYGPPCPPCPAPEFLGGPSVFLFPPKPKDTLMISRTPEVTCVVVDVSQEDPEVQFNWYVDGVEVHNAKTKPREEQFNSTYRVVSVLTVLHQDWLNGKEYKCKVSNKGLPSSIEKTISKAKGQPREPQVYTLPPSQEEMTKNQVSLTCLVKGFYPSDIAVEWESNGQPENNYKTTPPVLDSDGSFFLYSRLTVDKSRWQEGNVFSCSVMHEALHNHYTQKSLSLSLGK

SEQ ID NO: 306 - protein, 443 aa, Artificial Sequence
  Synthetic Anti-PD-1 antibody
QVQLVESGGGVVQPGRSLRLSCAASGFTFSSYGMHWVRQAPGKGLEWVAVIWYDGSNKYYADSVKGRFTISRDNSKNTLYLQMNSLRAEDTAVYYCASNVDYWGQGTLVTVSSASTKGPSVFPLAPSSKSTSGGTAALGCLVKDYFPEPVTVSWNSGALTSGVHTFPAVLQSSGLYSLSSVVTVPSSSLGTQTYICNVNHKPSNTKVDKRVEPKSCDKTHTCPPCPAPELLGGPSVFLFPPKPKDTLMISRTPEVTCVVVDVSHEDPEVKFNWYVDGVEVHNAKTKPREEQYNSTYRVVSVLTVLHQDWLNGKEYKCKVSNKALPAPIEKTISKAKGQPREPQVYTLPPSREEMTKNQVSLTCLVKGFYPSDIAVEWESNGQPENNYKTTPPVLDSDGSFFLYSKLTVDKSRWQQGNVFSCSVMHEALHNHYTQKSLSLSPGK

SEQ ID NO: 307 - protein, 443 aa, Artificial Sequence
  Synthetic Anti-PD-1 antibody
QVQLVESGGGVVQPGRSLRLSCAASGFTFSSYGMHWVRQAPGKGLEWVAVIWYDGSNKYYADSVKGRFTISRDNSKNTLYLQMNSLRAEDTAVYYCASNGDHWGQGTLVTVSSASTKGPSVFPLAPSSKSTSGGTAALGCLVKDYFPEPVTVSWNSGALTSGVHTFPAVLQSSGLYSLSSVVTVPSSSLGTQTYICNVNHKPSNTKVDKRVEPKSCDKTHTCPPCPAPELLGGPSVFLFPPKPKDTLMISRTPEVTCVVVDVSHEDPEVKFNWYVDGVEVHNAKTKPREEQYNSTYRVVSVLTVLHQDWLNGKEYKCKVSNKALPAPIEKTISKAKGQPREPQVYTLPPSREEMTKNQVSLTCLVKGFYPSDIAVEWESNGQPENNYKTTPPVLDSDGSFFLYSKLTVDKSRWQQGNVFSCSVMHEALHNHYTQKSLSLSPGK

SEQ ID NO: 308 - protein, 443 aa, Artificial Sequence
  Synthetic Anti-PD-1 antibody
QVQLVESGGGVVQPGRSLRLSCAASGFTFSSYGMHWVRQAPGKGLEWVAVIWYDGSNKYYADSVKGRFTISRDNSKNTLYLQMNSLRAEDTAVYYCASNGDHWGQGTLVTVSSASTKGPSVFPLAPSSKSTSGGTAALGCLVKDYFPEPVTVSWNSGALTSGVHTFPAVLQSSGLYSLSSVVTVPSSSLGTQTYICNVNHKPSNTKVDKRVEPKSCDKTHTCPPCPAPELLGGPSVFLFPPKPKDTLMISRTPEVTCVVVDVSHEDPEVKFNWYVDGVEVHNAKTKPREEQYASTYRVVSVLTVLHQDWLNGKEYKCKVSNKALPAPIEKTISKAKGQPREPQVYTLPPSREEMTKNQVSLTCLVKGFYPSDIAVEWESNGQPENNYKTTPPVLDSDGSFFLYSKLTVDKSRWQQGNVFSCSVMHEALHNHYTQKSLSLSPGK

SEQ ID NO: 309 - protein, 443 aa, Artificial Sequence
  Synthetic Anti-PD-1 antibody
QVQLVESGGGVVQPGRSLRLSCAASGFTFSSYGMHWVRQAPGKGLEWVAVIWYDGSNKYYADSVKGRFTISRDNSKNTLYLQMNSLRAEDTAVYYCASNGDHWGQGTLVTVSSASTKGPSVFPLAPSSKSTSGGTAALGCLVKDYFPEPVTVSWNSGALTSGVHTFPAVLQSSGLYSLSSVVTVPSSSLGTQTYICNVNHKPSNTKVDKRVEPKSCDKTHTCPPCPAPELLGGPSVFLFPPKPKDTLMISRTPEVTCVVVDVEHEDPEVKFNWYVDGVEVHNAKTKPREEQYNSTYRVVSVLTVLHQDWLNGKEYKCKVSNKAFPAPIEKTISKAKGQPREPQVYTLPPSREEMTKNQVSLTCLVKGFYPSDIAVEWESNGQPENNYKTTPPVLDSDGSFFLYSKLTVDKSRWQQGNVFSCSVMHEALHNHYTQKSLSLSPGK

SEQ ID NO: 310 - protein, 443 aa, Artificial Sequence
  Synthetic Anti-PD-1 antibody
QVQLVESGGGVVQPGRSLRLSCAASGFTFSSYGMHWVRQAPGKGLEWVAVIWYDGSNKYYADSVKGRFTISRDNSKNTLYLQMNSLRAEDTAVYYCASNGDHWGQGTLVTVSSASTKGPSVFPLAPSSKSTSGGTAALGCLVKDYFPEPVTVSWNSGALTSGVHTFPAVLQSSGLYSLSSVVTVPSSSLGTQTYICNVNHKPSNTKVDKRVEPKSCDKTHTCPPCPAPELLGGPDVFLFPPKPKDTLMISRTPEVTCVVVDVSHEDPEVKFNWYVDGVEVHNAKTKPREEQYNSTYRVVSVLTVLHQDWLNGKEYKCKVSNKALPLPEEKTISKAKGQPREPQVYTLPPSREEMTKNQVSLTCLVKGFYPSDIAVEWESNGQPENNYKTTPPVLDSDGSFFLYSKLTVDKSRWQQGNVFSCSVMHEALHNHYTQKSLSLSPGK

SEQ ID NO: 311 - protein, 113 aa, Artificial Sequence
  Synthetic Anti-PD-1 antibody
QVQLVESGGGVVQPGRSLRLSCAASGFTFSSYGMHWVRQAPGKGLEWVAVIWYDGSNKYYADSVKGRFTISRDNSKNTLYLQMNSLRAEDTAVYYCATNGDYWGQGTLVTVSS

SEQ ID NO: 312 - protein, 113 aa, Artificial Sequence
  Synthetic Anti-PD-1 antibody
QVQLVESGGGVVQPGRSLRLSCAASGFTFSSYGMHWVRQAPGKGLEWVAVIWYDGSNKYYADSVKGRFTISRDNSKNTLYLQMNSLRAEDTAVYYCASNGDYWGQGTLVTVSS

SEQ ID NO: 313 - protein, 113 aa, Artificial Sequence
  Synthetic Anti-PD-1 antibody
QVQLVESGGGVVQPGRSLRLSCAASGFTFSSYGMHWVRQAPGKGLEWVAVIWYDGSNEYYADSVKGRFTISRDNSKNTLYLQMNSLRAEDTAVYYCASNGDHWGQGTLVTVSS

SEQ ID NO: 314 - protein, 113 aa, Artificial Sequence
  Synthetic Anti-PD-1 antibody
QVQLVESGGGMVQPGRSLRLSCAASGFTFSSYGMHWVRQAPGKGLEWVAVIWFDGSNKYYADSVKGRFTISRDNSKNTLYLQMNSLRAEDTAVYYCASNGDHWGQGTLVTVSS

SEQ ID NO: 315 - protein, 113 aa, Artificial Sequence
  Synthetic Anti-PD-1 antibody
QVQLVESGGGVVQPGRSLRLSCAASGFTFSSYGMHWVRQAPGKGLEWVAVIWYDGSNKYYADSVKGRFTISRDNSKNTLYLQMNSLRAEDTAVYYCASNGDHWGHGTLVTVSS

SEQ ID NO: 316 - protein, 113 aa, Artificial Sequence
  Synthetic Anti-PD-1 antibody
QVQLVESGGGVVQPGRSLRLSCAASGFTFSSYGMHWVRQAPGKGLEWVAVIWYDGSNKYYADSVMGRFTISRDNSKNTLYLQMNSLRAEDTAVYYCASNGDHWGQGTLVTVSS

SEQ ID NO: 317 - protein, 17 aa, Artificial Sequence
  Synthetic Anti-PD-1 antibody
  misc_feature (4)..(4): Xaa can be any naturally occurring amino acid
  misc_feature (9)..(9): Xaa can be any naturally occurring amino acid
  misc_feature (16)..(16): Xaa can be any naturally occurring amino acid
VIWXDGSNXYYADSVXG

SEQ ID NO: 318 - protein, 4 aa, Artificial Sequence
  Synthetic Anti-PD-1 antibody
  misc_feature (2)..(2): Xaa can be any naturally occurring amino acid
  misc_feature (4)..(4): Xaa can be any naturally occurring amino acid
NXDX

SEQ ID NO: 319 - protein, 17 aa, Artificial Sequence
  Synthetic Anti-PD-1 antibody
VIWYDGSNEYYADSVKG

SEQ ID NO: 320 - protein, 17 aa, Artificial Sequence
  Synthetic Anti-PD-1 antibody
VIWFDGSNKYYADSVKG

SEQ ID NO: 321 - protein, 17 aa, Artificial Sequence
  Synthetic Anti-PD-1 antibody
VIWYDGSNKYYADSVMG

SEQ ID NO: 322 - protein, 4 aa, Artificial Sequence
  Synthetic Anti-PD-1 antibody
NGDY

SEQ ID NO: 323 - protein, 30 aa, Artificial Sequence
  Synthetic Anti-PD-1 antibody
QVQLVESGGGVVQPGRSLRLSCAASGFTFS

SEQ ID NO: 324 - protein, 30 aa, Artificial Sequence
  Synthetic Anti-PD-1 antibody
QVQLVESGGGMVQPGRSLRLSCAASGFTFS

SEQ ID NO: 325 - protein, 14 aa, Artificial Sequence
  Synthetic Anti-PD-1 antibody
WVRQAPGKGLEWVA

SEQ ID NO: 326 - protein, 32 aa, Artificial Sequence
  Synthetic Anti-PD-1 antibody
RFTISRDNSKNTLYLQMNSLRAEDTAVYYCAS

SEQ ID NO: 327 - protein, 32 aa, Artificial Sequence
  Synthetic Anti-PD-1 antibody
RFTISRDNSKNTLYLQMNSLRAEDTAVYYCAT

SEQ ID NO: 328 - protein, 11 aa, Artificial Sequence
  Synthetic Anti-PD-1 antibody
WGQGTLVTVSS

SEQ ID NO: 329 - protein, 11 aa, Artificial Sequence
  Synthetic Anti-PD-1 antibody
WGHGTLVTVSS

SEQ ID NO: 330 - protein, 23 aa, Artificial Sequence
  Synthetic Anti-PD-1 antibody
EIVMTQSPATLSVSPGERATLSC

SEQ ID NO: 331 - protein, 15 aa, Artificial Sequence
  Synthetic Anti-PD-1 antibody
WYQQKPGQAPRLLIY

SEQ ID NO: 332 - protein, 32 aa, Artificial Sequence
  Synthetic Anti-PD-1 antibody
GIPARFSGSGSGTEFTLTISSLQSEDFAVYYC

SEQ ID NO: 333 - protein, 10 aa, Artificial Sequence
  Synthetic Anti-PD-1 antibody
FGQGTKVEIK

SEQ ID NO: 334 - protein, 113 aa, Artificial Sequence
  Synthetic Anti-PD-1 antibody
  misc_feature (11)..(11): Xaa can be any naturally occurring amino acid
  misc_feature (53)..(53): Xaa can be any naturally occurring amino acid
  misc_feature (58)..(58): Xaa can be any naturally occurring amino acid
  misc_feature (65)..(65): Xaa can be any naturally occurring amino acid
  misc_feature (98)..(98): Xaa can be any naturally occurring amino acid
  misc_feature (100)..(100): Xaa can be any naturally occurring amino acid
  misc_feature (102)..(102): Xaa can be any naturally occurring amino acid
  misc_feature (105)..(105): Xaa can be any naturally occurring amino acid
QVQLVESGGGXVQPGRSLRLSCAASGFTFSSYGMHWVRQAPGKGLEWVAVIWXDGSNXYYADSVXGRFTISRDNSKNTLYLQMNSLRAEDTAVYYCAXNXDXWGXGTLVTVSS

SEQ ID NO: 335 - protein, 98 aa, Artificial Sequence
  Synthetic Anti-PD-1 antibody
QVQLVESGGGVVQPGRSLRLSCAASGFTFSSYGMHWVRQAPGKGLEWVAVIWYDGSNKYYADSVKGRFTISRDNSKNTLYLQMNSLRAEDTAVYYCAR

SEQ ID NO: 336 - protein, 95 aa, Artificial Sequence
  Synthetic Anti-PD-1 antibody
EIVMTQSPATLSVSPGERATLSCRASQSVSSNLAWYQQKPGQAPRLLIYGASTRATGIPARFSGSGSGTEFTLTISSLQSEDFAVYYCQQYNNWP

SEQ ID NO: 337 - protein, 439 aa, Artificial Sequence
  Synthetic Anti-PD-1 antibody
QVQLVESGGGVVQPGRSLRLSCAASGFTFSSYGMHWVRQAPGKGLEWVAVIWYDGSNKYYADSVKGRFTISRDNSKNTLYLQMNSLRAEDTAVYYCASNVDYWGQGTLVTVSSASTKGPSVFPLAPCSRSTSESTAALGCLVKDYFPEPVTVSWNSGALTSGVHTFPAVLQSSGLYSLSSVVTVPSSSLGTKTYTCNVDHKPSNTKVDKRVESKYGPPCPPCPAPEFLGGPSVFLFPPKPKDTLMISRTPEVTCVVVDVSQEDPEVQFNWYVDGVEVHNAKTKPREEQFNSTYRVVSVLTVLHQDWLNGKEYKCKVSNKGLPSSIEKTISKAKGQPREPQVYTLPPSQEEMTKNQVSLTCLVKGFYPSDIAVEWESNGQPENNYKTTPPVLDSDGSFFLYSRLTVDKSRWQEGNVFSCSVMHEALHNHYTQKSLSLSLG

SEQ ID NO: 338 - protein, 439 aa, Artificial Sequence
  Synthetic Anti-PD-1 antibody
QVQLVESGGGVVQPGRSLRLSCAASGFTFSSYGMHWVRQAPGKGLEWVAVIWYDGSNKYYADSVKGRFTISRDNSKNTLYLQMNSLRAEDTAVYYCASNGDHWGQGTLVTVSSASTKGPSVFPLAPCSRSTSESTAALGCLVKDYFPEPVTVSWNSGALTSGVHTFPAVLQSSGLYSLSSVVTVPSSSLGTKTYTCNVDHKPSNTKVDKRVESKYGPPCPPCPAPEFLGGPSVFLFPPKPKDTLMISRTPEVTCVVVDVSQEDPEVQFNWYVDGVEVHNAKTKPREEQFNSTYRVVSVLTVLHQDWLNGKEYKCKVSNKGLPSSIEKTISKAKGQPREPQVYTLPPSQEEMTKNQVSLTCLVKGFYPSDIAVEWESNGQPENNYKTTPPVLDSDGSFFLYSRLTVDKSRWQEGNVFSCSVMHEALHNHYTQKSLSLSLG

SEQ ID NO: 339 - protein, 442 aa, Artificial Sequence
  Synthetic Anti-PD-1 antibody
QVQLVESGGGVVQPGRSLRLSCAASGFTFSSYGMHWVRQAPGKGLEWVAVIWYDGSNKYYADSVKGRFTISRDNSKNTLYLQMNSLRAEDTAVYYCASNVDYWGQGTLVTVSSASTKGPSVFPLAPSSKSTSGGTAALGCLVKDYFPEPVTVSWNSGALTSGVHTFPAVLQSSGLYSLSSVVTVPSSSLGTQTYICNVNHKPSNTKVDKRVEPKSCDKTHTCPPCPAPELLGGPSVFLFPPKPKDTLMISRTPEVTCVVVDVSHEDPEVKFNWYVDGVEVHNAKTKPREEQYNSTYRVVSVLTVLHQDWLNGKEYKCKVSNKALPAPIEKTISKAKGQPREPQVYTLPPSREEMTKNQVSLTCLVKGFYPSDIAVEWESNGQPENNYKTTPPVLDSDGSFFLYSKLTVDKSRWQQGNVFSCSVMHEALHNHYTQKSLSLSPG

SEQ ID NO: 340 - protein, 442 aa, Artificial Sequence
  Synthetic Anti-PD-1 antibody
QVQLVESGGGVVQPGRSLRLSCAASGFTFSSYGMHWVRQAPGKGLEWVAVIWYDGSNKYYADSVKGRFTISRDNSKNTLYLQMNSLRAEDTAVYYCASNGDHWGQGTLVTVSSASTKGPSVFPLAPSSKSTSGGTAALGCLVKDYFPEPVTVSWNSGALTSGVHTFPAVLQSSGLYSLSSVVTVPSSSLGTQTYICNVNHKPSNTKVDKRVEPKSCDKTHTCPPCPAPELLGGPSVFLFPPKPKDTLMISRTPEVTCVVVDVSHEDPEVKFNWYVDGVEVHNAKTKPREEQYNSTYRVVSVLTVLHQDWLNGKEYKCKVSNKALPAPIEKTISKAKGQPREPQVYTLPPSREEMTKNQVSLTCLVKGFYPSDIAVEWESNGQPENNYKTTPPVLDSDGSFFLYSKLTVDKSRWQQGNVFSCSVMHEALHNHYTQKSLSLSPG

SEQ ID NO: 341 - protein, 442 aa, Artificial Sequence
  Synthetic Anti-PD-1 antibody
QVQLVESGGGVVQPGRSLRLSCAASGFTFSSYGMHWVRQAPGKGLEWVAVIWYDGSNKYYADSVKGRFTISRDNSKNTLYLQMNSLRAEDTAVYYCASNGDHWGQGTLVTVSSASTKGPSVFPLAPSSKSTSGGTAALGCLVKDYFPEPVTVSWNSGALTSGVHTFPAVLQSSGLYSLSSVVTVPSSSLGTQTYICNVNHKPSNTKVDKRVEPKSCDKTHTCPPCPAPELLGGPSVFLFPPKPKDTLMISRTPEVTCVVVDVSHEDPEVKFNWYVDGVEVHNAKTKPREEQYASTYRVVSVLTVLHQDWLNGKEYKCKVSNKALPAPIEKTISKAKGQPREPQVYTLPPSREEMTKNQVSLTCLVKGFYPSDIAVEWESNGQPENNYKTTPPVLDSDGSFFLYSKLTVDKSRWQQGNVFSCSVMHEALHNHYTQKSLSLSPG

SEQ ID NO: 342 - protein, 442 aa, Artificial Sequence
  Synthetic Anti-PD-1 antibody
QVQLVESGGGVVQPGRSLRLSCAASGFTFSSYGMHWVRQAPGKGLEWVAVIWYDGSNKYYADSVKGRFTISRDNSKNTLYLQMNSLRAEDTAVYYCASNGDHWGQGTLVTVSSASTKGPSVFPLAPSSKSTSGGTAALGCLVKDYFPEPVTVSWNSGALTSGVHTFPAVLQSSGLYSLSSVVTVPSSSLGTQTYICNVNHKPSNTKVDKRVEPKSCDKTHTCPPCPAPELLGGPSVFLFPPKPKDTLMISRTPEVTCVVVDVEHEDPEVKFNWYVDGVEVHNAKTKPREEQYNSTYRVVSVLTVLHQDWLNGKEYKCKVSNKAFPAPIEKTISKAKGQPREPQVYTLPPSREEMTKNQVSLTCLVKGFYPSDIAVEWESNGQPENNYKTTPPVLDSDGSFFLYSKLTVDKSRWQQGNVFSCSVMHEALHNHYTQKSLSLSPG

SEQ ID NO: 343 - protein, 442 aa, Artificial Sequence
  Synthetic Anti-PD-1 antibody
QVQLVESGGGVVQPGRSLRLSCAASGFTFSSYGMHWVRQAPGKGLEWVAVIWYDGSNKYYADSVKGRFTISRDNSKNTLYLQMNSLRAEDTAVYYCASNGDHWGQGTLVTVSSASTKGPSVFPLAPSSKSTSGGTAALGCLVKDYFPEPVTVSWNSGALTSGVHTFPAVLQSSGLYSLSSVVTVPSSSLGTQTYICNVNHKPSNTKVDKRVEPKSCDKTHTCPPCPAPELLGGPDVFLFPPKPKDTLMISRTPEVTCVVVDVSHEDPEVKFNWYVDGVEVHNAKTKPREEQYNSTYRVVSVLTVLHQDWLNGKEYKCKVSNKALPLPEEKTISKAKGQPREPQVYTLPPSREEMTKNQVSLTCLVKGFYPSDIAVEWESNGQPENNYKTTPPVLDSDGSFFLYSKLTVDKSRWQQGNVFSCSVMHEALHNHYTQKSLSLSPG

SEQ ID NO: 344 - protein, 329 aa, Artificial Sequence
  Synthetic Anti-PD-1 antibody
ASTKGPSVFPLAPSSKSTSGGTAALGCLVKDYFPEPVTVSWNSGALTSGVHTFPAVLQSSGLYSLSSVVTVPSSSLGTQTYICNVNHKPSNTKVDKRVEPKSCDKTHTCPPCPAPELLGGPSVFLFPPKPKDTLMISRTPEVTCVVVDVSHEDPEVKFNWYVDGVEVHNAKTKPREEQYNSTYRVVSVLTVLHQDWLNGKEYKCKVSNKALPAPIEKTISKAKGQPREPQVYTLPPSREEMTKNQVSLTCLVKGFYPSDIAVEWESNGQPENNYKTTPPVLDSDGSFFLYSKLTVDKSRWQQGNVFSCSVMHEALHNHYTQKSLSLSPG

SEQ ID NO: 345 - protein, 330 aa, Artificial Sequence
  Synthetic Anti-PD-1 antibody
ASTKGPSVFPLAPSSKSTSGGTAALGCLVKDYFPEPVTVSWNSGALTSGVHTFPAVLQSSGLYSLSSVVTVPSSSLGTQTYICNVNHKPSNTKVDKRVEPKSCDKTHTCPPCPAPELLGGPSVFLFPPKPKDTLMISRTPEVTCVVVDVSHEDPEVKFNWYVDGVEVHNAKTKPREEQYNSTYRVVSVLTVLHQDWLNGKEYKCKVSNKALPAPIEKTISKAKGQPREPQVYTLPPSREEMTKNQVSLTCLVKGFYPSDIAVEWESNGQPENNYKTTPPVLDSDGSFFLYSKLTVDKSRWQQGNVFSCSVMHEALHNHYTQKSLSLSPGK

SEQ ID NO: 346 - protein, 329 aa, Artificial Sequence
  Synthetic Anti-PD-1 antibody
ASTKGPSVFPLAPSSKSTSGGTAALGCLVKDYFPEPVTVSWNSGALTSGVHTFPAVLQSSGLYSLSSVVTVPSSSLGTQTYICNVNHKPSNTKVDKRVEPKSCDKTHTCPPCPAPELLGGPSVFLFPPKPKDTLMISRTPEVTCVVVDVSHEDPEVKFNWYVDGVEVHNAKTKPREEQYASTYRVVSVLTVLHQDWLNGKEYKCKVSNKALPAPIEKTISKAKGQPREPQVYTLPPSREEMTKNQVSLTCLVKGFYPSDIAVEWESNGQPENNYKTTPPVLDSDGSFFLYSKLTVDKSRWQQGNVFSCSVMHEALHNHYTQKSLSLSPG

SEQ ID NO: 347 - protein, 330 aa, Artificial Sequence
  Synthetic Anti-PD-1 antibody
ASTKGPSVFPLAPSSKSTSGGTAALGCLVKDYFPEPVTVSWNSGALTSGVHTFPAVLQSSGLYSLSSVVTVPSSSLGTQTYICNVNHKPSNTKVDKRVEPKSCDKTHTCPPCPAPELLGGPSVFLFPPKPKDTLMISRTPEVTCVVVDVSHEDPEVKFNWYVDGVEVHNAKTKPREEQYASTYRVVSVLTVLHQDWLNGKEYKCKVSNKALPAPIEKTISKAKGQPREPQVYTLPPSREEMTKNQVSLTCLVKGFYPSDIAVEWESNGQPENNYKTTPPVLDSDGSFFLYSKLTVDKSRWQQGNVFSCSVMHEALHNHYTQKSLSLSPGK

SEQ ID NO: 348 - protein, 326 aa, Artificial Sequence
  Synthetic Anti-PD-1 antibody
ASTKGPSVFPLAPCSRSTSESTAALGCLVKDYFPEPVTVSWNSGALTSGVHTFPAVLQSSGLYSLSSVVTVPSSSLGTKTYTCNVDHKPSNTKVDKRVESKYGPPCPPCPAPEFLGGPSVFLFPPKPKDTLMISRTPEVTCVVVDVSQEDPEVQFNWYVDGVEVHNAKTKPREEQFNSTYRVVSVLTVLHQDWLNGKEYKCKVSNKGLPSSIEKTISKAKGQPREPQVYTLPPSQEEMTKNQVSLTCLVKGFYPSDIAVEWESNGQPENNYKTTPPVLDSDGSFFLYSRLTVDKSRWQEGNVFSCSVMHEALHNHYTQKSLSLSLG

SEQ ID NO: 349 - protein, 327 aa, Artificial Sequence
  Synthetic Anti-PD-1 antibody
ASTKGPSVFPLAPCSRSTSESTAALGCLVKDYFPEPVTVSWNSGALTSGVHTFPAVLQSSGLYSLSSVVTVPSSSLGTKTYTCNVDHKPSNTKVDKRVESKYGPPCPPCPAPEFLGGPSVFLFPPKPKDTLMISRTPEVTCVVVDVSQEDPEVQFNWYVDGVEVHNAKTKPREEQFNSTYRVVSVLTVLHQDWLNGKEYKCKVSNKGLPSSIEKTISKAKGQPREPQVYTLPPSQEEMTKNQVSLTCLVKGFYPSDIAVEWESNGQPENNYKTTPPVLDSDGSFFLYSRLTVDKSRWQEGNVFSCSVMHEALHNHYTQKSLSLSLGK

SEQ ID NO: 350 - protein, 107 aa, Artificial Sequence [sequence omitted]

SEQ ID NO: 351 - protein, 448 aa, Artificial Sequence
  Synthetic Anti-PD-1 antibody
EVQLVESGGGLTQPGKSLKLSCEASGFTFSSFTMHWVRQSPGKGLEWVAFIRSGSGIVFYADAVRGRFTISRDNAKNLLFLQMNDLKSEDTAMYYCARRPLGHNTFDSWGQGTLVTVSSASTKGPSVFPLAPSSKSTSGGTAALGCLVKDYFPEPVTVSWNSGALTSGVHTFPAVLQSSGLYSLSSVVTVPSSSLGTQTYICNVNHKPSNTKVDKRVEPKSCDKTHTCPPCPAPELLGGPSVFLFPPKPKDTLMISRTPEVTCVVVDVSHEDPEVKFNWYVDGVEVHNAKTKPREEQYNSTYRVVSVLTVLHQDWLNGKEYKCKVSNKALPAPIEKTISKAKGQPREPQVYTLPPSREEMTKNQVSLTCLVKGFYPSDIAVEWESNGQPENNYKTTPPVLDSDGSFFLYSKLTVDKSRWQQGNVFSCSVMHEALHNHYTQKSLSLSPG

SEQ ID NO: 352 - protein, 220 aa, Artificial Sequence
  Synthetic Anti-PD-1 antibody
DIVMTQSPSSLAVSPGEKVTMTCKSSQSLYYSGVKENLLAWYQQKPGQSPKLLIYYASIRFTGVPDRFTGSGSGTDYTLTITSVQAEDMGQYFCQQGINNPLTFGDGTKLEIKRTVAAPSVFIFPPSDEQLKSGTASVVCLLNNFYPREAKVQWKVDNALQSGNSQESVTEQDSKDSTYSLSSTLTLSKADYEKHKVYACEVTHQGLSSPVTKSFNRGEC

SEQ ID NO: 353 - protein, 448 aa, Artificial Sequence
  Synthetic Anti-PD-1 antibody
EVQLQQSGPELVKPGTSMKISCKASGYSFTGHLMNWVKQSHGKNLEWIGLIIPYNGGTSYNQKFKGKATLTVDKSSSTAYMELLSLTSDDSAVYFCSRGLRGFYAMDYWGQGTSVTVSSASTKGPSVFPLAPSSKSTSGGTAALGCLVKDYFPEPVTVSWNSGALTSGVHTFPAVLQSSGLYSLSSVVTVPSSSLGTQTYICNVNHKPSNTKVDKRVEPKSCDKTHTCPPCPAPELLGGPSVFLFPPKPKDTLMISRTPEVTCVVVDVSHEDPEVKFNWYVDGVEVHNAKTKPREEQYNSTYRVVSVLTVLHQDWLNGKEYKCKVSNKALPAPIEKTISKAKGQPREPQVYTLPPSREEMTKNQVSLTCLVKGFYPSDIAVEWESNGQPENNYKTTPPVLDSDGSFFLYSKLTVDKSRWQQGNVFSCSVMHEALHNHYTQKSLSLSPG

SEQ ID NO: 354 - protein, 219 aa, Artificial Sequence
  Synthetic Anti-PD-1 antibody
DVVLTQTPLSLSVSFGDQVSISCRSSQSLVNSYGNTFLSWYLHKPGQSPQLLIFGISNRFSGVPDRFSGSGSGTDFTLKISTIKPEDLGMYYCLQGTHQPPTFGPGTKLEVKRTVAAPSVFIFPPSDEQLKSGTASVVCLLNNFYPREAKVQWKVDNALQSGNSQESVTEQDSKDSTYSLSSTLTLSKADYEKHKVYACEVTHQGLSSPVTKSFNRGEC

SEQ ID NO: 355 - protein, 450 aa, Artificial Sequence
  Synthetic Anti-PD-1 antibody
QVQLQQWGAGLLKPSETLSLTCAVYGGSFSGYYWSWIRQSPEKGLEWIGEINHGGYVTYNPSLESRVTISVDTSKNQFSLKLSSVTAADTAVYYCARDYGPGNYDWYFDLWGRGTLVTVSSASTKGPSVFPLAPSSKSTSGGTAALGCLVKDYFPEPVTVSWNSGALTSGVHTFPAVLQSSGLYSLSSVVTVPSSSLGTQTYICNVNHKPSNTKVDKRVEPKSCDKTHTCPPCPAPELLGGPSVFLFPPKPKDTLMISRTPEVTCVVVDVSHEDPEVKFNWYVDGVEVHNAKTKPREEQYNSTYRVVSVLTVLHQDWLNGKEYKCKVSNKALPAPIEKTISKAKGQPREPQVYTLPPSREEMTKNQVSLTCLVKGFYPSDIAVEWESNGQPENNYKTTPPVLDSDGSFFLYSKLTVDKSRWQQGNVFSCSVMHEALHNHYTQKSLSLSPG

SEQ ID NO: 356 - protein, 216 aa, Artificial Sequence
  Synthetic Anti-PD-1 antibody
EIVLTQSPATLSLSPGERATLSCRASQSVSSYLAWYQQKPGQAPRLLIYDASNRATGIPARFSGSGSGTDFTLTISSLEPEDFAVYYCQQRSNWPPALTFGGGTKVEIKRTVAAPSVFIFPPSDEQLKSGTASVVCLLNNFYPREAKVQWKVDNALQSGNSQESVTEQDSKDSTYSLSSTLTLSKADYEKHKVYACEVTHQGLSSPVTKSFNRGEC

SEQ ID NO: 357 - protein, 451 aa, Artificial Sequence
  Synthetic Anti-PD-1 antibody
QVQLVQSGSELKKPGASVKVSCKASGYTFTDYSMHWVRQAPGQGLKWMGWINTETGEPTYADDFKGRFVFSLDTSVSTAYLQISSLKAEDTAVYYCANPYYDYVSYYAMDYWGQGTTVTVSSASTKGPSVFPLAPSSKSTSGGTAALGCLVKDYFPEPVTVSWNSGALTSGVHTFPAVLQSSGLYSLSSVVTVPSSSLGTQTYICNVNHKPSNTKVDKRVEPKSCDKTHTCPPCPAPELLGGPSVFLFPPKPKDTLMISRTPEVTCVVVDVSHEDPEVKFNWYVDGVEVHNAKTKPREEQYNSTYRVVSVLTVLHQDWLNGKEYKCKVSNKALPAPIEKTISKAKGQPREPQVYTLPPSREEMTKNQVSLTCLVKGFYPSDIAVEWESNGQPENNYKTTPPVLDSDGSFFLYSKLTVDKSRWQQGNVFSCSVMHEALHNHYTQKSLSLSPG

SEQ ID NO: 358 - protein, 214 aa, Artificial Sequence
  Synthetic Anti-PD-1 antibody
DIQMTQSPSSLSASVGDRVTITCKASQDVSTAVAWYQQKPGKAPKLLIYSASYLYTGVPSRFSGSGSGTDFTFTISSLQPEDIATYYCQQHYSTPRTFGQGTKLEIKRSVAAPSVFIFPPSDEQLKSGTASVVCLLNNFYPREAKVQWKVDNALQSGNSQESVTEQDSKDSTYSLSSTLTLSKADYEKHKVYACEVTHQGLSSPVTKSFNRGEC

SEQ ID NO: 359 - protein, 268 aa, Artificial Sequence
  Synthetic Anti-PD-1 antibody
PGWFLDSPDRPWNPPTFSPALLVVTEGDNATFTCSFSNTSESFVLNWYRMSPSNQTDKLAAFPEDRSQPGQDCRFRVTQLPNGRDFHMSVVRARRNDSGTYLCGAISLAPKAQIKESLRAELRVTERRAEVPTAHPSPSPRPAGQFQTLVVGVVGGLLGSLVLLVWVLAVICSRAARGTIGARRTGQPLKEDPSAVPVFSVDYGELDFQWREKTPEPPVPCVPEQTEYATIVFPSGMGTSSPARRGSADGPRSAQPLRPEDGHCSWPL

SEQ ID NO: 360 - protein, 16 aa, Artificial Sequence
  Synthetic Anti-PD-1 antibody
SLAPKAQIKESLRAEL

SEQ ID NO: 361 - protein, 18 aa, Artificial Sequence
  Synthetic Anti-PD-1 antibody
LDSPDRPWNPPTFSPALL

SEQ ID NO: 362 - protein, 10 aa, Artificial Sequence
  Synthetic Anti-PD-1 antibody
DSPDRPWNPP

SEQ ID NO: 363 - protein, 9 aa, Artificial Sequence
  Synthetic Anti-PD-1 antibody
EVPTAHPSP

SEQ ID NO: 364 - protein, 8 aa, Artificial Sequence
  Synthetic Anti-PD-1 antibody
ISLAPKAQ

SEQ ID NO: 365 - protein, 371 aa, Artificial Sequence
  Synthetic IL-2 Anti-Apoptotic Fusion protein
APTSSSTKKTQLQLEHLLLDLQMILNGINNYKNPKLTRMLTFKFYMPKKATELKHLQCLEEELKPLEEVLNLAQSKNFHFDPRDVVSNINVFVLELKGSETTFMCEYADETATIVEFLNRWITFCQSIISTLTGGGGSMSQSNRELVVDFLSYKLSQKGYSWSQFSDVEENRTEAPEGTESEMETPSAINGNPSWHLADSPAVNGATGHSSSLDAREVIPMAAVKQALREAGDEFELRYRRAFSDLTSQLHITPGTAYQSFEQVVNELFRDGVNWGRIVAFFSFGGALCVESVDKEMQVLVSRIAAWMATYLNDHLEPWIQENGGWDTFVELYGNNAAAESRKGQERFNRWFLTGMTVAGVVLLGSLFSRK

SEQ ID NO: 366 - protein, 371 aa, Artificial Sequence
  Synthetic IL-2 Anti-Apoptotic Fusion protein
APTSSSTKKTQLQLEHLLLDLQMILNGINNYKNPKLTRMLTAKFAMPKKATELKHLQCLEEELKPLEEVLNLAQSKNFHFDPRDVVSNINVFVLELKGSETTFMCEYADETATIVEFLNRWITFCQSIISTLTGGGGSMSQSNRELVVDFLSYKLSQKGYSWSQFSDVEENRTEAPEGTESEMETPSAINGNPSWHLADSPAVNGATGHSSSLDAREVIPMAAVKQALREAGDEFELRYRRAFSDLTSQLHITPGTAYQSFEQVVNELFRDGVNWGRIVAFFSFGGALCVESVDKEMQVLVSRIAAWMATYLNDHLEPWIQENGGWDTFVELYGNNAAAESRKGQERFNRWFLTGMTVAGVVLLGSLFSRK

SEQ ID NO: 367 - protein, 371 aa, Artificial Sequence
  Synthetic IL-2 Anti-Apoptotic Fusion protein
APTSSSTKKTQLQLEHLLLDLQMILNGINNYKNPKLTRMLTAKFYMPKKATELKHLQCLEEALKPLEEVLNLAQSKNFHFDPRDVVSNINVFVLELKGSETTFMCEYADETATIVEFLNRWITFCQSIISTLTGGGGSMSQSNRELVVDFLSYKLSQKGYSWSQFSDVEENRTEAPEGTESEMETPSAINGNPSWHLADSPAVNGATGHSSSLDAREVIPMAAVKQALREAGDEFELRYRRAFSDLTSQLHITPGTAYQSFEQVVNELFRDGVNWGRIVAFFSFGGALCVESVDKEMQVLVSRIAAWMATYLNDHLEPWIQENGGWDTFVELYGNNAAAESRKGQERFNRWFLTGMTVAGVVLLGSLFSRK

SEQ ID NO: 368 - protein, 371 aa, Artificial Sequence
  Synthetic IL-2 Anti-Apoptotic Fusion protein
APTSSSTKKTQLQLEHLLLDLQMILNGINNYKNPKLTRMLTFKFYMPKKATELKHLQCLEEELKPLEEVLNLAHSKNFHFDPRDVVSNINVFVLELKGSETTFMCEYADETATIVEFLNRWITFCQSIISTLTGGGGSMSQSNRELVVDFLSYKLSQKGYSWSQFSDVEENRTEAPEGTESEMETPSAINGNPSWHLADSPAVNGATGHSSSLDAREVIPMAAVKQALREAGDEFELRYRRAFSDLTSQLHITPGTAYQSFEQVVNELFRDGVNWGRIVAFFSFGGALCVESVDKEMQVLVSRIAAWMATYLNDHLEPWIQENGGWDTFVELYGNNAAAESRKGQERFNRWFLTGMTVAGVVLLGSLFSRK

SEQ ID NO: 369 - protein, 113 aa, Artificial Sequence; identical to SEQ ID NO: 84
  Synthetic IL-2 Anti-Apoptotic Fusion protein
